United States Patent Application Publication US 2007/0054278 A1 - sequence listing, part 40

SEQ ID NO: 94469 - DNA, 961710 bp, Homo sapiens
  misc_feature (1)...(961710): n = A,T,C or G
cgcccagcctggcagaggcagccccgcctccgggctgaggcgctttaatctctcacttttcaggctgattcctagaataggggttcttaatgtggaaatggctttctattcctgcctggatgccgccctggtttaacacgttgttttcgatccgatggaaacatttagaaaacctcagtggggtgtggggactccttggtcccaagggtctgtgctgccaggaggggatgctgagattggggggtagctatggcccaggcaatgcccacctgccagcaggcaggcgcttcactcttaccccccctgcagtgggcagggcgcatcctcatttacatctgagaatgcaagggagaagggaggctttgccaggtgcatggctttgtgtttgctgcagaggaggtggggttggagcctgggcaccctgctctctctccagaatgttaaaaatgaggatgatgtttaaaaagagcatctcttcaaacactgcaccttccttttctatgatgatgcgttcgttcctaggaaaaaatgtgatttaacataaccccagagcctcaggctgtcgtaagccctagcgttttctgcagggagaggtgggaaacatggctttgacaggaatcacatctgggatgggctctggcattgaaacccacggtggtgagactgccactgctgcaggtgacatctgtcatcaaaggacctgctccaggcagtagggactggggttcctggggtgctggcatggttttttttaaggctgtagagggggacaggacaaagacacagagtgactgacagtaacagggtcggattgggcgtggagtctgtgagctctgaagagcgggggaggctggcggggccagggaggaaaaggctgggtatagattacttcactctgcttcgttatattttttagatgaggaaatctgtgtgtgttccttgtaccaagtgagtggtgctgacacaggtgaagcccccgcatccccttctcaggggctgtcccagttcaggttcagcaacttccccaacagacctgcatctccatgtttgcacagccacggggtcctggcgttcccgttgctgtgtgtgttggtgctgtctgggaagatgctttcctgtttgcagttggatcccagggccttggtcattccagcctcaaagcagggtcttcagtgagcccctctcaggaagggtgattagtgagtggccagcagctcacaggcttctgaggagtcctgtctgcagcttggaggcaacaggtgccggtgctgagcctgctgtccaggaacctcccctcctccctctttggttcctgctgtgggatgccagctcacatcagctggattttatgggcctcagtggaaagtgtagcacacatttcagaaggcgtgtgcatcctgctgctgatgacagcctttctctgccctcatggcagtcaggcgagaagcctgaacccaggaagggccttccacggtggtggtagagacagggttgggcaggggccatggatttttaggccatgtctgccttggccacagcgacgcccagagatgggaggaagcagagcaggtgcatgtggtacaggatgtgccgagcttcctcccagccagtgagagaggtggtgggctctgttcacatttactgtatttccacaatgaacaacaaactctccataaacatctcttaggagtgattggggtaagagaggcagatccagcctgactccttgcaaaactggatccattttcatcttgagaagggtaagaaaaaaggggcaccacaatggtgacaagatactgcttagagttctgaggacacagtagggaagcagaatcagaacaagatcagcatgcatgagtgtacccatgtacgtgtgcatacgtgcacccatgtacgtgcatgcatatgtgtacgtgtctgcaggtgtatgctcacatgtatgagtgtgtgcatgtgtgtatgcatgcaggtgtgcgtgtatgtgtgcaggcatgagtgtgcctgtgaatgggcatgactgcatgcatgcatgagtgtacccatgtacgtgtgtgcatacgtgtacgtgtctgcaggtgtatgctcacatgtatgagtgtgtgcatgtgtgtatgcatgcaggtgtgcgtgtgtgtatgtgtgcaggcatgagtgtgcctgtgaatgggcatgactgcatgcatgcatgagtgtacccatgtacgtgtgtgcatacgtgtacgtgtctgcaggtgtatgctcacatgtatgagtgtgtgcatgtgtgtatgcatgcaggtgtgcgtgtgtgtatgtgtgcaggcatgagtgtgcctgtgaatgggcatgactgcatgcatgcatgagtgtacccatgtacgtgtgtgcatacgtgtacgtgtctgcaggtgtatgctcacatgtatgagtgtgtgcatgtgtgtatgcatgcaggtgtgcgtgtgtgtatgtgtgcaggcatgagtgtgcctgtgaatgggcatgactgcatgcatgtatgagtgtgcatgtgtgtatgtatatgtgtgcacatgcttgtgggtgcatgtgtgtatatgtgtgcacatgcattcatgactggatgtgcttgtctctgtgctgaagcaggagggataccctgtgaatacagagtgaggaggaacccctgagcaccacagccctgctatagggttcagcagaggagcaatttgagaatttggggaatgtcacatgttttcatgcaaaagggtggataatacattgaagtgaaggaattccagttttaagtgctgggcacacaaggttaagggccccacaggccgctgttggctttccttgtggatttagcttcttggcctcagaatgacatctggaccttagtgtatgcagtctgtgagccgacagggtacacaagtccaggatgccacttgccgccacatggcgggtgtggagcccactcgaggaaggcgtgtgcccgaggcgcctgggctgggttgaaccagtgtctgccagagaaaatgtcttttctctggatgatttatggtcataattactattagtaggtggctgatacttaaaatgaaatttgctctttcgtaattttagaacaaataacttagcagtcaaattagcatatccactggctgggtgaaatatgcataacatttgcagctctggtaatcatgtgaaatgctgctgctgtgtttgcctctcaccaaggagtgctgcaggttttccactgtcacttctcatcagtcctctggagtaacgaatcaggttgggcacatgccagtaacaggtggttttccaaggtcaggatccaagagatcatttgatgcacatctcattcagatcacatctaactgtcagccacgattaaggcagagatgggaagaaaacaggggctttcttcccggtgcctctcctagcagagctccgtcatctgccatttccacgtgacaaacatggagttagaacgtgagctgtgtctgcagcatccctgcatctgccttcccccaaggtctctgttcctccacgctggagatgcaccctagaatcctgagcagagtcctgcagctcctgccagagccgggaccagggacgttccacgacatcggactaacctccagcacatctccggtgtggtcacatccttactgctcccagctccttctctgtgcgcctctgtgtgcctggggcgggaggggccctcacagctgaggctctccctctgggaggcagtgaggggagccttggaggtcactgcgtgaggatctgagaggacctctaacctccatgctgaccttttcaaggtcactgcttttgtggggagtggtgtctgcctctcctcctgctgttcaagtgccaggtgtgtgtctctcagaacgttccctgccacgctcctgtaggccgttcacctcctctgcctggctcagacacttgttgaatgaagaaataatgcagagaatgcagactgaatgtggggttagctgatgggtaaatgggattaagaaatgaaatgctggccaggcgcggtggctcacgcctgtaatcccagcactttgggaggccgaggcaggtggatcacttgaggtcaggagttcgagaccagcctggccaacatggtgaaatcccgtctctactaaaaatacaaaaattagttgggtatgctggcgcacgcctgtagtcccagccacttgggaggctgaggcagggggattgcttgaacctgggaggcagaggtcgcagtgagccaagatcactccattgcactccagcctgggtgataagagcaagactccatcaaaaaaaaaaatctgtttttcatgagattgttatttcaaaacaaaacaaacaaaaactcccccaaaccaaaaacaatctctgcttggattggaggctcccgtcaatgggtggggtgtccacccgcctgtgactgctggcaggcgatggtggtgggcactgggctgggcaggcactggctgggcaggccagggctgcacctaggccacctcctgggaggaagcagatcccagccaggggccgccctgcaactgtggaaggctcgtgaagctgttgtgagacgagcgaggctgcctcctcctgtgaactcccagcgttgggtcctgctaggctctgtgctgccttaggtctggaatgacgtttagttttaaagcctccgcacgtgctggtttaaggcaaccaagggcttcctctgtaagggttttaggccagctccctcatgaggaagtagtgactggaaactttaacgtgaccctgggggtgaatccctcagtaattcataactttctccagattcctcagtttctttgttcacccatttgctcctgggcacctgccctgtgccagacacacagagggcatgggaggaaacagtagagggtggaaacaggcgtgtgcccggctcctgaactccaggagagggaaatacacactcaatccacagtcactgcacagtgtggcgagtcccgaaaaggacgcctgggcagccccgggagagtctggggcttccacagggatcttagcggatgaacaggcgtttgtcggctggtgaagcagcattgaaggcactgtgctttgcaggaatgagtgaaagacactgcgcgttcacaccacacctggcctttgctggcggtgcgactcccgcctagtggccctggggccctcccggttctggtgtccagggtgctcacgccctcgcgggagccgctccctagcggggtggtgctttctggacccatctctctgtgtttaagacaggcgtggacgtggagccgaacgccaacctttgccagcctgctcggccgcgggggatgcgtggcttggggtcgcctggccacccaggcaccgcggagcttctggagccccttcctgggtggggactgaggcgctgcctctgccccgcgtctcctccagggcctggcccagccgcgctggcctttcctgcccgtcttcgtctctgctgcctccgctgcctcctttcctctcccgaccctctcctgcgtctcttgtctgtggccacggacgccacggtttgcttcccacgcagccgggctccccgcggagctcgttacctccctggaagcctccgctccccggcgcccggcagccttgcttccagggacgcggtgcgtgcggtgagcacccggtccaggggaggcgccgggcccaggggaggcctcaaggggaggccccggccccgctgctgctcccgcggccagagagtctcctgtgatgacgccggcttgaccctcagcccagagctgtgggcctggtccaggtgagagctgggctccgggactaggccaggaggcctcgcacgtggccgggtcaggggcgcagcgttctggcttcagaataatcggccccatctcggaaaagccgggtcggaggagcctgcttgaccggcggtttctctgaaattcaccagggggccaggaaggcagcctcgggggcacccccctcctcccctccagctgaccgcgtctcttctctgtttccccgcaggctgcctgctcgaggagggcctctgcggagcgtccgaggcctgtgtgaacggtgagtgtggggtcctggctgctgcgccctggtctgcccctctcctgcccgccgtgcgcagcgcccagcctggtgagccccgccgctggcctggagctggggccgcccggggcgcgctgccgagaggaggcggatggaaccccggagccatgggctgcggcctcggtgggtggggagaagaggttgcccgggttctgggcgcccatcgctcgcaccaacccttgctttctgattttgttttgctctgtccttcggcaagtttttcatccttttttaaaaaatttttttgagacagagtctcgctctgtcgcccaggctggagggcagcggggctatctcctctcactgcaaccttcgcctcctgggctcaagcgattctcctgcctcagcctcctgagtagctgggattacaggcgtgcgccactgcacccggctaattttttgtatttttagtagagacagggtttcaccatgttggccaggctggtctcgaactcctgacttcaggtgatccacccgcctcggcctcccaaactgctgggattacaggcgtgagtcaccgcgcccggccaggtttttcgtcctttaagccactgattttcctctcttatcaggcggataagaaaacagtgcaaacgctgtgttttcaggttgggctgaaagcccatgaggacggcagttattatgaaatacggcgagcagcgggtcctgcagagccccttccctccagcgcggtcaggcagagggcatctcccagggcagacgccacccgggcctgtcatgctggtgaactgggcgctgtgcgctctgaacgcgcaggggagggttaaactccagtatcctcagaaaagcgctgggcggagccgcctttctccaagtcaggggctgcgtgtgggcccggggcgcactgagcgaggccttctctttccccagctccctgcgcatctgtcctcagactgtgggcaggagcggatttaatcctagcgaggatggcggggcctgcccagaggcccctcgcacccactaatctctgcacagacgtgggtgccggcgggggactgaggtgcagggcagggcgctggcctggggtgccgccctcctggggcctttcaggacaggcctcccctgcactggtgcatccagggggagccgaggtgaatgcctctgagggtctgagaagcgaaaccgaggagctcgtgcgccctgaggtgggaccagccctgggttccggatggaattttggggctgggggcacctctgtgtctgtgcctaggcagcttctggggtcgggaagggaagccacggtggaggcgccaagaggagagcaggtcctcagcggcggcagcttctgctgttttctcttctttcgggagattcctgtgccgagtgtgacaagtgggaaccggcagctcgtggggtgcagtgtgggtggtgggtgaggttctggcccagcctaggaccccctggggctccctggcatctactccgtgcagctttaatttggaggcagccttaagaaaaatagcgatattgaaaatcctacgtcgtctgcctggactcaacagcttttgatgataatggaagcaggtgtgtgtgtttaatttaattggagccgtaagtagccccagcagaataaaagccgaggctgtctccccggctccttgacaaaggccggcctgggtgtccgactgtgatcattctcagacatttttctcctcaaccttgacttgcctcccagacatagagtcgtctcaacatcatatccagataatgactgtggattccttggaaaggaaaagcaatttaaatgtaaatacacatattcaggccttgatttgtagaaacagatgatatttgattttttttttttatgatgcactgaaggtctaggaaacagcgaagccagtggtgcccagtcttagaaaactgcgctttgcgaggctgacggggagcgataggagaagtggttcctgtgctggctcagatttatggttgccatggtgactggtttagcccgaggctggcgggccaggggtgcggcagcccagggtgcggtggggggcggctgcgagtctagaacattctgtcaccagccgcagggtctctttctctccctctggctcactctctctctttccccctctcttttcttaaggtacgtgtaggaatatataatcttatcaagcttggatatgttttttaaaagcccaacagaggttattaataaaaagaaagtcaaaagataaacataccacctcacacccattaggatggctagtattaaaaaacccctgaaaatcggtgttggtgagaatgtggagaaattgaacamttgtgcgctgctgatgggaatgtaaaatggcgtcgttgctgagggaaacagtatggtggtttcctaaaaaattaaaaatagagtttttaatttgcctcagcaaccccacttctgggtacgtaccccataacacaggaagcagagacttgaagagctgtttgcacacccatattcatagcagttaatgcacaacagccaaaggcgaaagcagcccagtgtccactgatgggcgaatggacaagtgaaacrtggtccatccacatgatggaatagtacgcagccttgaagaggaagtgagtgctgacactcgctgaaacatggggggagcttgargctgttatgctgagtgaaataagccagtcacaaaaggacaaatactgaatgattccacgcatgtgacgtactaaagatagtcaagttcatagagacagaaggtaragtgayggggccaggggctgggggacagttggggtgtcagtgtttaattggtggagtttcagtttgggacgatggaagagttctgggaatagacggtggtgatgactgatcaacagtgtgaatgtaattaacaccaccgaactgtacacttaagaatggctaagatggtaaattttaatgtgacryatattttaccacaatatgcaattggaactatgaaactgcagcctcygcacatgctcatytaacgtaatcgaatgcttcagctgtaagggttttaggccagctccctcaggaggaagtcrtgattggaaactttaaagtgaccctgggggtcaattccttggtaattcataactctggagtaactttggttattatagaaaaaactgtaagggttctggaagagaaagcttaagataaagcaatcacataatcctggaacagcttgtagaaaagagagtttagatgctgttacatgggcatcctaaatatgaggaaaacaggtttcaaagaatttttaaagyggatttgatttcatggttgataactttaaatgggacayatccaaacacaggtggtatgtcctaaacattctaaaggyataataatcaactactccacaatagaaaaaaggaaaacaaatctatgaagattaaaatagatcacgcttatgtcgggaagtgagctggtcgctttcacgccctgctggtgggagcatggcctgacgtgatcgtgatggacgctgactggccagcacgttcacgccacataagsgaggtggcccgtgacccggcaatctgatgtgtgagaatatgccccaakaaaataatccattacccaaaatactaaagaaaacttgaagcacaaagctgctctctgcagtggtgtttgtattaattttaaaacagtagacaaatcattaatattaaacaaaggagaatgcttctttaaagctatgttatggtcacatgattcaaatgttaagcagacattaaaagagaagtgttcaaaaagttgttaataacgtcggaaaatgcaggtgggagaaagtaaatgaaaaactcaggatccaaaactgagcrtctaatacgatgacagccrtgcgaaaatgtggatagcagaaaaagctcaaagaaatacaccacactgtgaatagtggctctctctgggtagtgacttttattttcttcatatttctctggttttccagtttttcacgtgagcatgttcctgctaaaaggacaagagaggtgggaaggaggcacatgaaggaaccaccattccctttgagctcagaaaggaggagaggcctgtgcaggaggggygcagagaggggtggccgagcaggmggggcgcagagaggggtggccgagcaggaggggcgcagagaggggtggccgagcaggaggggcgcagagaggggtggccgagcaggaggggcgcagagaggggtggccgagcaggaggggcgcagagaggggtggccgagcaggagrggcgcagagaggggtggccgagcaggaggggcgcagagaggggtggccgagcaggaggggcgcagaggggtggccgagcaggaggggcgcagagaggggtggccgagcaggaggggcgcagagaggggtggccgagcaggaggggcgcagaggggtggccgagcaggaggggcgcagagaggggtggccgagcaggaggggcgcagagaggggtggccgagcaggaggggcgcagaggggtggccgagcttctaagagtgcgtcaggacgaccacaccatagcgctggagcccaggggcggaaatcccggacgtccaggagggcaagaggagcaagtcgcgctctccgtttggagggaggtggaagaatggtgactgacaggtgggggaggatggctcagctacacacctgtcggctccgtgtctcgtggctcaaggctgaattatgctgtgacgacccacaagccctgcgctcggtggcccaggtgacacgggcctgcgggccgttgcagggtgtctgccttccctccgcaggtgccctcccgggacgctggcggccggggccacagcaacagcggctgggaggggtgcccttgcgctcgtggctcactccgccggccacgctgatggtggggaggctcctcctgcagccgactccccgtggcggcgtcacagccacagccttcacgtctccaactgcagcttcttctattccaagccctttctccactgaagagggcagaaaaccaccaggaaccgaggacgtctgtgatggtggagtgctgtccggccgtggaaagggaggcaggaagcaccggcacactgacgcggaggaacctgggaatcgccgtgctcagaggaagaaaccgagtcacaaaagtcacgggggacatgatttcatttatacaaaatgtccaggaggccagggcggaggctcaccctgtaatcccagcacttcaggaggccgaggcgggcagatcacttgagatcaggagttcacggccagcctggccaacatggtgaaaccccgtctccactaaaaatacaaaaattagctgggcgtggtggcgcgtgcctgtgatcccagctactctggaggctgaggcaggagaatcgcttgaacctgggaggtggaggttacggtgagccgagttcacaccattgcactccagtctgagcaacagagtgagactctgtctctaaataaataaataagtaaataaataagtaaataagtccaggagaggtaagtcggtagagacagaaagtaggttgtggccgtgtagggctggggaaagtgttgggggcatgggaagtgatggcagaggggcaggttccctttggtggtactgagaggctctgaggtggacggtgaggtggtcacggaactctgaacattcagaaaaccgttgactcttacagttttttgttttttttaagacaagcacttgttctgtcgccaaggttggcgtgcagtggtgcaatcctagcctaacgcagccttgaactcctagtctcaagtaatcctctcacctcagcctccctagtagctgggactacaagcacacaccatcatgcctggctatttaaaaaaawttttttttttgcagtgatggagtctcactatgtttcccaggctagtcttgaactcgtgacctcaagtggtcctcccacyttgacctcccgaagtgctgggattacaggcatgagccattgcgcccggccaactcctatactttaaaaggctgagttatgtggtatatgaattatgtttcaataaagctgttttttaaaagaaagaaaaaagaactgaggatacagttaggcaaggaggtaagcatagtgaaggatatagccagagaattgcatttctttaataaggggttacttccctgaccccagacagatgggctccctcccaggacattcaacccaacacaaaacaagatggttgaaaatgctggctccaccatctgggcacaaagcagaacaataagcttgtccctctcagatttgggagtttttccagcaaacaatcacctcccattgcaacttaggtactaaaagcactagcgttgtccccaaagtggaagactttagaatattcaaatccagagtgtctccctaattctttgaagctatgtgattaaccctatttggattttcggccacagcaagcagcaaaggctatcagtgggaaattatttattgagtgagtggatacaagaataaatgaatcatgctttcatggcacaagagacacccccatagccctcaaataaaagatttatataccatagtggggaaaaagtaatttctcacccctctccaggttcatggctgagacttgtaacaaaagacagattaataagagaaaaccctacccacttatttaataccggttttctatgtcacatgggagccttcagaaatgaagacccaggaaacagggaagcctgtttttatggacagttgtgcagaagtgtgatcggagggcaaagggcgtgctctgatgtcataggctgaagggctcagcaaggcctgtctggagtcttctagctgcttctgtgtcttcggagataaggacattcccctctgggcatagggaggcccctctggaatgagggtcttatgacctgcctccgaggagaaggggctgggggaattctggtttctgtggtctgcttctgccgttttctcgagggccaccctgccatattttgaggtagcgtgttctgaatccagtctatataaacattgcatatcaattcccaaaagtgtgcttcagaaattgcccaagaaaaactagtgaatgggctcatttgtgaatataaaaaaaaccactgatttagcatctacaggcagacctcggagatattgtgggttcaattccagggcactgcaataaagcaaatatgacgataaagtgagtcacacagattttctagttttccagtgcatataaaagttacattttactaggctgtggtctattaagtgtgtaatagcactatgtctaaaaaacaatgtacaggccttcattaaaaatgtttttgctaaaaatgctaatgatcacctgagctttcagcaagttgtaatcttcctgcgggtggagggtcttgccgcagtgttaatggctgctgattgatcagggccgtggttgcttgaagcttggggcaactgtgttaatttcttaaaataagacaaataaaattgactgcatcagttgactcttccttcatgaaagatttctttgcagaacgcaatgctgtttggtagcattttacccgcagtagaacatttttcaaaattaagagtcaatcctttcaacccctgccactgccttatcaaataagttgatgtgatattctgaatcctttgttctgattttcacaatgctcacagcatcttcaccaggagtagattccatctccagaaaccactttctttgctcgtccctaggaagcaactcctcacctgttaaagttttatcatgagattgtggcaatttggtcacatcttcaggcagctctgctaatgctggttcccttgctgttcccaccacatctgcagttccttcctctactgaagtcctgaatccctgaaagtcatgcatgagggttggactcagcctcttccaaactcctgtgaatgttgctattttgacctccctccatgaatcgcaagtgttctcaatggcatctagaacggtgaattttttccaggaggttttcaatttactttacccagatcagtcagaggaatcactatctatggcagctgtcatcttacaaagtgtgtttctaaaatataagtcttggctgggtgcagtggctcatgtctgtaatcccagcactttgggaggccgacgcaggtggatcacaaggtcaggagttcaagaccagcctggccaagatggtgaaaccctgtctctactaaaaatacaaaaattagccgggcatggtggcatgtgcctgtaatcccagctatgcgggaggctgaggcaaggaattgcttgaacctgggaggcggaggttgtagtgagccgagatcgcaccactgcactccagcttgggcgacagagcaagactctacctcaaaatatttgtatatatgtcttgaaatggaaattattttttgatccctgggctgcagaatggacgaggtgtcagcaggcatggaaacaacacccacctccttgtacagctgcatcacagctcttgggtgactggtgcactgctgatgagcagccatattttgaaaggaatcttttttgagcagtaggtctcaatagtgggcttaaaatattcagtaaaccatgctgtaaacagatgtgctgtcatccagctttgttccagtgacagagcacaggcagccatagatttagcatgattcttaagggccctcggatgaacaagcattggctttgacttaaagtcctcagctgcatcagctcctcacaagagagccagcctgtgctttgaagctttgaagtcaggcgctgtcttctctctagctatggaagtcctagatggcatcttcttcaatgtaaggctgtttcatctacattgaaaatctgttgttagagcagccaccttcgtcactgatctcagccagatcttctggagagcttgctgcagcttctccatcagcacttgctgctgcaccttacactgttatgttatggagatgactcctttccttcaacctcatgaaccaacctctgcgagcttcagagttttcttctgcagcttcctcacttctctcagccttcatggaattgaagagtgagggccttgctctggattaggctctggcttaagggaatattgtggctggcttggtctatccagaccactcagactttctcaatatgagcagtaaggctgtttcactttctcgttttctggagtagcacttttaattttctccaagaacttttcctttacattcacaacttggctaactgttttacacgagaggcctcatttttggcctattcttggctttcggcatggcttcctcactaagtttaatcatttctagcttctgatttaaagtgagagaggtgcggctctttctttcacatgaacacttagaggccactgtagggttgctaattagcctaatttcaatattgttgtgtctcagggaatagggaggctggaggagagggagcgagatgggagaatggctggtcagttacgcagtcagaacacacacagcattgatcagttatgctcactgtcttctatgggcacggttcatggtgccccaaaacaatgacagtaacaccaaagatcacggatcacagctcagggatccaacactgtggaaattaccaaaaggtagcacagagacaggcgatgagcacgtgctgctgggaaaatggtgccgatggactcctccatagggttgccacaaggcttcagggtgagacgcaacccccgcgacgtggaacaaagctggaacgtgctcctaggaaggtcgtgctcctcagactctttatttaggtttgatcaagcagtgaattcaatttgtgctgcagaaacagttgccagaccctaccttcttggaatctagaatcccaattgggaaattcctgccaagtagagaaccagtggctcagttgttgcatggtgctgctgtcattacccaaacagcagtcgatctccagagcaggagcccccgctcccacagcagcgaggatgacgcccactgcgccgcagagctggcttgcgcccgccaccccgtagtaccctgtgagctctccgagaatcagccttcgggcactggagggtccgggaatgcaaggctcattctgcccacccccacaggcagcagccaggacctggtctctccgccatgtggcctcagcatttccaggctctctgagtggtttgtgattcacagagcgtagatctctcagttgctacctcatctgtttttcaaacccattgtgcttttccgcagcctcccaggtgtcaaaagttattattctattttttgccagttccataaaacagaacagctctgcgtctcagagttgctgctgcactctgggtgtcccccagatcacagcaggagctggcagacgcagcctgtgattgctaatcatgaaaatggagaggaaaaaaagttctgagctcatccaacggaagcgttcactctgcttcctccagacttcaagaaggctttagtcaggaaagaagagcggaggagagagggagggaggctgtcggcgagtgggtcaccattcgggagctccaggccgcttgcagcaacgtccaggctgttttgtattgagcgctcacagaaagtccaggctgagtacctcctgtgccacgccgccccactcacattgagtaacatgagccccattcacagccttagggtgaggaaattggaattcagaagagttcggtgacttgttctaggccgcagctctcaggcagccactttgcacctcggtctgtctgcatctccggcctctgttctttacctcttctgcccccgaaacactcactcgtgggtcctgtcctgtggcatgtccacagctgagaaacacgggagccactgcccccaacaatgtgggtattgttagatgtgtgtttccccagtgactgtcgcrgtgacacgtgttttcatgtcctgtggggccactttcacctctgcttctgtaagttactgctcccatctttgccccattcccactgagttttgtctttttcttggactgtgtaggagctccttgtcattgagaatatgaacgtgtctgccacacaagttgctaattaaacagccactgaattacatctctgtacggcgtgtacacaagtcagagcccacttttataagttgtgtttctcgtctgccccccacagtcatcctgatatgaaaccttcagtggctccctctttcccacagaatcaagtcaaaactgaagggcagccttggggtgtgtggtccttctccatgtgggtccagctcagggatgcgttgaaagcagcttccttatcaggttaattttggcgttattcccactccactttctttcccatgcccttgtcacggctccgcatcccacccgttctttgagacgcagagcgggcctctgcctcctcattcgttacygacgtgctgagccttcctttcccactcttccccagtggcgtccattgctcaccctacgcacagcaccgaatgccaggagaatgatcaagaccttgtgctttcacgmcccttccagtytgcagttttccgagtgtctgtacggcgctgctttccctcctctagccgtccactgcagtgcacctgcaggagtgctggctgatttctggacagtttgggtcctggggaccagacgtagcagtcatgggctgagccttcttcattcaagcagcacctggggccgcggctcccgtgctgtgtgatgacccaytcagcccactctctttgccgccgtgcctgtcccacgctccgtggtgactctgcagcatggcctgcctaccaccccttggctcttcccactcggtttcctgccccacaggctctcggtcctgtccctgctccgctgaccagcgctctctccccttctctgtcttcaggtgcctccctctttcctggccaagggtggatgtgtggaggcagagttgtggacaccgcctgtgcttcctgcctgttggggcagcttggtccccatgggggctgaaaagagcaacctggccgtggcttggctgagctttcagttgctttttccagaaaggcagcagggggcctatccacatcccaggccaggcygaaaacctggggtgaggggtgggtgatgctgccttggaaatagacatggatttcttgaacttacaggaagcatacactattggggtgtcaaagagttttttgctttaatagaaaattcagcacattctttaaaatcaaattctcggttgcctctcttgacccacttcggtattattttaatagtggatgatggcagcaaagtctgattttatgaaaagggaagatgttggccattacagtattacccacttttctctttcaggtgtgtcaattaaaatcaattaaaaaatgaattatacrtatatggatatattcaaaatgaacagtttggaactatctagaataaaaagtaaaaattccttttgtgtcccttcaccaaatctcactcccactcggaggtaacagacatttcctgtttgctgtgtgccctgttttctgtgcgtgttaaaatgtcagacaggactgcatgatatgtgcttaatgaagaaaatctagcagccagggccctgaaatggtctaaccatctttgcattattggttagtaatgaaccggaccatctaagatgtcccagccaccttgtgggcagggccccgccccttcatcctctcagaggggctgaggcaacrggaagacccacagctgtgagacacgagaccgcatcactccgtgtgactggcagtctcattgcactcccaaattccaatgaataaaacctaaaaggagatggaaacgaatgactgaattgaactatgtgaagctcagccttatttggtgtattaacagaaaaagtgacgtgatattgagacttcagattagtgacttgaggtgagttaaaatcagttcagctcagtttgggtctcacacacaygtgagctcagatgtatgcatgtgaccccacccaatggctctgaagatgcggttcgctcctcaaactttccagrcttttctctcctcagaagtttgctgggaggaaggagaagcgggaggaacagaaccagattgacgttctcgcgtctcttcttacttgggcgtatttatagcatccccgctaaggacgccctcgttttagaggaacaygttttacattttttttccagcctccaggctgcctggcagcctcaggcggagaagcagattgactcggtgtcagggtcacactctcaggccccttggcggcacagacagggtgagggtgcctgctggggcccctctctctcctctccctcccgagcggcgtctgtgctgtgaattttcacggagacacaggctgatccttcgtgcgtccttggctggcagttgttggtgacttacagtcattcatgtgctggcaacggatggccctgctgtcttgtgttgggacagctgtgcgcatcggcgtcattgatatgatttgaatttggtgctatctggtgtggctttgtaactaaagtcataaatagtggagaaacgatgtgtctggttctaaattaacagtgggactgggtgcagtggctcacgcctgtaatcccagcactgtgggaggccaaggcaggcgaattgcttgagctcaggagttcaagaccagcctggcaacatggtgaaaccccttctctacaaaaagtacaaaaatcagccaggtgtggtggcatgtgcctgtggtctcagctactygggaggctgaggtgggaggatcacttgagcccaggaagaggaggttgcagtgattaagcctttgcactccagcctgggcaacagagccagactctgtctcaaaaacaaaccaacaaacaaatggcgggaggaacacaaatcgtagtaagtatgatatgcaggtttccgagcccagatgtgcagccctggattttcaagtcttccctcaagtcaggactttaaggaragaactctgggttttgtgtttctgcacaatgaagttctaatatctgactcccaaacttcttccccgtgagactgccttaatgatgcttatgtagactggactggaatccccactaagagaataaattacccgttaaccaagacggtctccaggtgtgtgtgtgccttggcttggaagttcaatttcacagtagttagaatagctgcttgaccccacaggcctgagaggggaggtaggattcaaggaagctggagagtgagcccagcaggggcatgtcctaaaaaccccgagaaggtattggagtgcccggctggggtgtgggtgtcagctgggggtggaggcgggcgtgccctcccgagggtgttttgctgggggttcctctgctgagtgggcccgtccttggtgattgtccctggtgcacggcyggcttgttaagcaggggcgaagcgtgcacaaggtcacctttctccagcatcctcatcttcatggtctcgctgggagagtggccgggggtgcctgaatcaagggaactagaacaggtgctgaagctgttcccactcgcaggaggaagagcagcatctggccccagacagggggagctggggagtcctcagggcccttcggggcctccctagacaggggaagccggggagtcctcggggcccttcggggcctccccagacaggggaagccggggagtcctcggggcccttcggggcctccccagaactgtgctcgttggtggcatccacaggctgctcctctgggagcttgttgcttttcgggtcctgagccctcccgcytgccaccgtggcgtcagggaaactggtgcctcccaagcacccccagctcttctgcrtgagaaggttggagactgtgctgcagccggggttcttatgatcaccttcctccctcgccagcatctgccctggagctgaaygaggaccaccaggctcctcagggcctgtctccgtggggyaccaggaggcgcaaatgccagtttgcatcattgccctgttttcagctgtccaggatgcccatgtctgcagaacgcagtgtgcacagtcccacagggcacccygtggcatcacccggcctctctctttgacttctctcccgctgaacagcgagtgcttccccaaagccatgggcagccccactcccgactccctcagtggtcagayggtcacccgcctcttagccgaccttgggaagagggtccctctcagatgggcacccgcctcttagctgaccttgggaaaagggtccctctcagacgggcacccgcctcttagctgaccttgggaagagggtccctctcggaggaggggtgcccacattctgctgggcggttgactctggtggaggtggcccgtagttygggcgggcacatgggcatgctctgtgcaacctgcagcatttactaagatgctcttgaaagaccgttttcccttttatctgctgggttgactttcccatttatcaaattaactttctaaacccttaaatttcagagatttgagaggataaggaattgtttagtagatgaaactcatttkcatatttccagaggcatgtccaaaaactaaatggggttgagcatttctcagggaaaagttractcggggtgccagttacacgcagtgttttccagaggtcctggggtccaaggccttcccatggctgaatctcccggtttactccgctttttgatgaaggagcaagttttgaatgtggagtcctgtagagttcgctgtgcctcttgggttggcctggcttagctgtggctgatgaccagctgtgaggggacacagtggggccgcacgggggctgggccagtgctgcacccgcccagcgccagggctgacctcatttgcttatagcctgcttttgcttttggtctcctaagcgcgagatcttgatgtctacctagaaatgtcactgacgtaggagaaagggattttttttttgcttttaccatgaagggttgtcatgggcctgtgtgaaagamattaagtaaattagatatcagccccaaggaatgttaatatctgagatttatactggagtagttttcgcttcccaatttattttcttttaaatacttamaacatttggtttttaagctatttatagccaaccttttttttaaaaattaatgtttaaaatgttttttccccccaatctatcatggtygactgttagacagttggatggctgtgtggttttcaaagctgaggtcaagtttgaatgagctcatttcagatcactctagattttctgaggctgacagtgtccttgggacaccatgtttggggaatgtgtttttgcagtttacgaagcacccgctgctcagagagccgggaaacctttccttctcttttcttggagtctagttgccatggagattgtcactaaattatggacgagggagaggcgagccggcacttggaggtctctgatacgcaggcttctcaatcagggtgcacagacacagcagaggccgtgcagaggctgcagcttgccctcccggctgtcctgggcgtggatgtagcctcccgaaacagctcgtcagaggggtttattcagagaacggaagtgtgcttatggcaggaagagcttcaagggttctcacatatgtttacagctgctctttctccttagcaggactctgagtggctgcagtgtttagagaaatctgccaaatcctgatttaattttggttcatttgctaacaggattggaggagataggaaattgatcttggggaccgtgaagctgctgaggttcagccacgaccaggagtttggagggataatgtctgtgcgtggccataccattttgaaaagcacaaaaccttttatcattaaagcagaaatatcgaaccaaacgtggattctaaagattatgcatacaacaaacacatgtctttcggtgcaggcatttctgcacctaatttcaggcctaatctcagtggctcagcagtgcagtgtgggcaaatgcttaaccaccagcatttgcagcatttgggacctgatttgcagccgggttctctagtgtaaggcccccgccccgccgccactgctgcctcccagttactgacgcagtgtcactgaaggtggagttgggaggaaatgtggacggccagctctcgggcccttgcatgcaacggccttgttatttyagaggcgccgtctaatcattcttgggacgytggtctgctctgtcttttgaggcagtttccatagaggtggggtctgtgttaagagtgcattgaagggtgagtgatttccctctaactgatgggtgatgttcatggtctgagtctgtgtgcaaagcttagcctggggctgctttggaacctgctctctctattccaggcctgggtgctttgagatattcttgrgctggaataacacccagcacctgctcttgtgactgaaatggcrtaaagtaataatagtgcactgcatgggggttaatgcctttctgagtgttttatatgttatcgtgttagatttctgcaccgtcactgacaataacagggcatgtatttttgttctcatttaacagatgacaaacttggtcccttagtgttaaatgtgggtgacacacaggcagaatctgatctggaaccacamtgatcgggcgtcttcccatccttcctccaatcagctcacccttyggcttctcaaaggcccacggaatttatggtggttcatcgttctttgccttaagatgcaggttctagatttgctactgggacccacggtgactttgatttgtctcttgtgaactctctatgatgctggcaaaagagaggaaatggtcacgtattggtcagatgaatgttgcagggaagaataattgcattacatgaaatgcctgcaggaaccgtggtgggaatggaaccgtggtggggcaggaaccgtggcgaggccggaaccgtggcggggccggaaccgtggcggggccggaagcatgattggagtcaggtgggccacatttcctggctgtcccatgtcttctctttgccctgacagtggtctcagccgacagaacgggcaacagacacgcacccagcctgagaggggccctggggccggggcgcccgccaattgtcagagtcttcttggttgcttttcaattcagaaatcagasaaatgatttgtagagagttttccttttcttcatttagcttgaaatcaattttgttagtaagkttttttttttgtttgtttgtttttgtttttttgagacggagtctcgctctgtcccccaggctggagtgcagtggcgcaatctcagctcgccacaacttctgactcccgggttcaagcgattctcctgcctcagcctccctagtagctgggactacaggcacctgccaccacacccagctaatttttgtatttttagtagagacagggtttcaccatgttggccaggttggtctcgatctcctgaccttgtgatccacccgcgtcggcctcccaaagtgctgggattacaggtgtgagccactgcgcccagccattagtaaggttttaaacttgtcctcagaattagaagaaatcccagagactggagaccagcagtgctgtgtgtgggtgagaccctgttgaagatcccttggtaagtccagtgggcgtggtccataggagggggaggcgggaggggagctggctcaggagaggctggctttgcctccaaagaagagccccaccctcttgtgctggcctctcgtgctggccttttcctattgtccttcagagaggaggaagctttgctcagcttctcaccaattaaaagagcactgtgaggttggacaggagtgcaatttatgaaaacaaaacaaaaaaaacctttgacatggtgaaaccccgtctccactaaaaatatggtgaaaccctgtctccactaaaaatataaaaatacagaattagtcgggcatggtggtgcacgcacgtaatcccagctacttgggaggttgaggcaggagaatcgcttgaaccttggaggcagagkttgcagtgagctgagatctcaccaccgcactccagcctgggtgacagagcaagacctcatctaaaaaaaaaaaaaatccatgtgatctataaaatctcacggaaacacacacctaaggtcacgcatttcactgtaacatgagcgggaagatgtactgagcctgttctccacctcggtgaatgctccgaccccctcttgcctcacctcccactgtatrcatttgttcctttttaattttttgaagactggtcaagtgcagtagwgagaaggsggaargggtacaacaaggagctagattgggaactgactgagcagccggtcggggtgacgcaacgctaccttcctacccccaccctttgctcctgttgtcgctgagtcgtgctccgtcgagggacacaccacgtcttgcttgtacccacacaggttgttcccagcatttggctgctgtgagcatcctcgcgtgaaccttttcaggagctgagctcttagaggagaaggcagcgctgtgttgagcacccaccgggagaagttccgtcaaatccagggtacttgagattctggaaagatgcagaaatgtaaaaaataaaaacaagcaacaagcrgtttatcccacaagtcactaggaaaatgtattgttgtctctctaacagtcaaatcctattggtcggccttagtttttctgcaaaacagaataaattttatgtttttttccccagttgttgaaataaaatgctataaccatatttgcttataaactatgtccaaatgagattcttttatttctacttgacgattttccaccatgtcaggccctgttatgatggcagcccgttgtgatgcactaggacagatcccagctcccaattcttttatgaggcactaggacaaatcccagctcccaattcttttatgaggcactaggacaaattccagctcccaattcttttatgatgcactaggacaaatcccagctcctgttatggcaacagcccgttatgatgcaataggacaaatcccagctcccaattcttttatgatgcactaggacaaatcccagctcctgttatggcgacagcccattgtgatgcaataggacagatcccagctcccaattcttttatgatggcactagaacaaatcccagctcccaattctttgcatttttttttttttttttttggccaggttttctctctcacttgctggggcacgaacagatgctctttggtgtttttaatgattgaggagcatcttgctgttgtcgttctcatttgttttcaaggaacagaaacgctctcgagcgagtgctcggtggagctgggcaagctgctgaccacaggggaagatgactcaacaattgggattttgcttcttctttctttaaaaagatgcaaaagaactagacccacactttacacatttttttggtgtgttcattgtggactagtgttgttgttgttgttgttgagacaggggagatggtctccctctgttgcccaggctggagtgcagtggtgctatcttggctcactgcaacctccccctcctggggttcaaacgattctgctccctcagcttcctgagtagctgggattacaagtgcctgccaccaccactggctcatttttgtattttagtagagacaggatttcaccatgttggccaggctggtctcaaactcctgacctcaaatgatccacctgccttggcctccctaagtgctggggttacaggtgtgagccactgtgcacagccaaaaacagtgttttcctttcctcagtctgaaagcctgacactgttgatccaccaggagtgtgcatgrgtgtgcatagtgttgatccaycrggagtgtgtgtgggtgtgcatagtgttgatccaccgcgagtgtgtgtgggtgtgcatagtgttgatccaccgggagtgtgcatgggtgtgcatactgttgatccacccggagtgtgtgtgtgtgcatagtgttgatccacctggagtgtgcatgggtgtgcatagtgttgatccacctggagtgtgcatgggtgtgcatactgttgatccacctggaatgtgcataggtgtgcatactgttgatccaccaggaatgtgcgtgggtgtgcattctgttgatccacccggagtgtgtgtgagtgtgcatactgttgatccacctggagtgtgcgtgggtgtgcatactgtttatccacccggaatgtgcgtgggtgtgcatactgttgatccacctggagtgtgtgtgggtgtgcatactgttgatccacccggagtgtgcgtgggtgtgcatagtgttgatccactgggagtgtgtgtgggtgtgcctactgttgatccaccaggagtgtgcctgggtgtgcacactgttgattgaccaggagtgtgtgtgggtgtgcatactcttgatcgattgggagtgtgtgggtgtgcacattgttgatcgggagtgtgcgtgggtgtgcacgctgttgctccaccgggagtgtgtgtgggtggggggtgtgcatgcctgtatgcacaatagagtctcgatctttgtgggacaagcataggggactgggcatcagtcaggaagcttgggcttgtcttgccctgccaccaccctgcgcacccctctctattcaagccacagctctgtgcacgttggatttcttacgtgcaaaacaagggggtcagccatgccggtggtaacacctggaaacacctggaagctttgaaaaatastgatgcccagacataamctggcgccagtgaatcagaatgtcagctgagggcggcraggggcggggtgggggcgggacccaggctttgccgtcctttctttttctctgaagcttcccgaggtgactgtaatgtgctatcagagttgaggakctctgggcaagacgatcctgatgaaaccctcccaccctgaaacgccagctgtgctttgtgtaacaaagccaaaggtgcggtgagggaattcagtttcctcattattacttctatggtttgttagcaaaaacataattagcatgaaagatatttctctgtggacatgcaaatcaatgcaaatgactaatttgccatttaagaatttgcaaattgcaatgcaaaattgtcttaggtaaataaccctagtctaattgagtgacaatattctgtgttttgttattaaggctattagctgaagatgtaggaagactgtaaaaatgccacaatttttgcttatacatgcagtgtgagttataatttmcgggagattttaygcacattgtttcacttgagccccacaattccagttgcatcctagactagctacygtaaagtagcacagggtaaatgggtggcggtgaaagcaagaatttgaacagcttgccacagtgtaacaaacgcaacagcaacagaaacatcaasagggccttccccrggggctcccaggtctttggcagcagaattacccaagttttggccagtgacttaaacacacgccatgtaaaaggatgagatgggaacagaacaaagagcccagaaataaacctgaccatatatggtcaactaggtgtgaagcagactctggggtaagagccgtctctttaaatggtttcggggaaactggacatccacactcaaaagaatgaaatgggaccttaycttacaccgttctcaaaaatctgcccaaaattggttaaagacccaaacacaagatctgaaactgtaaaactctgaaaacatacaggaagagctccttgacattggtctcggcaagaagttttggacaagacccaaaarcacaggcaacaaaagcaaaataaatgagtgggactatatcaaactgaaaagctgccgtgcggtaaaggaaaccatcaaaatgaaaaggcagcctacagggcgggagaaaatgttgaaaaaccatagatctataaggtgttaatatctaaaatatataaggaactcactcaactcaatagcaaaacaaacaaacaaacaacacacacaaaaaaacccaaaagccaaaaaacccccaaaccctccaattttaaaaagggcaaagracctgaatagaacatttttccaaagaggacatacagatggctgacaggtatgggaaaggtgctgagcatcactaatcattggaaacgcacatcagagccccagtgacttaccctctcacacctgtgagaatggcttttatcaaaaagacagaagataacaagtgttggcaagtgtgtagagaaaagggacacttggaygctttgtttgagacagtctcgctctgtcctacagtggcacgatctcagctcactgcaacctctgcctcctgggttcaagtgattctcctgcctcagcctcccgagtagctgggattacagacatgtgccaccatgcctagctaatttttatatttttagtagagatggggtttcaccgtgttggccaggctggtcttgagctcctgacctcaagtgatccaccygcctcagcctcccaaaattctgggattacaggcgtgagccactgcacctggccaacttgcacactgtttatggaaacagtgtgtaggttcctcaagaaattaaaaacagtgctaccatcaacgcctcttttggttatagatccagaagaaattaaatgggcagaagaggtgtctgcaccctgatgctcattgcagcactattcaccagggcatggagacagtacaggtgtttctgatggatgaatggatagagcaattgtggtatacatacacaatggatactattcagccttaaaaaaggagatcctgtcattttcaaaacatggatgaacctggaggacatgatgttgtaaatagtgtgaagtaagtgaaataagccaggcacagaaaggcagatactgcatgatctcacacatatgtagaatcttaaaaaaaaaagttgactacatagaaacagagagtggaaagctggttatggtttggggggtgggagtggcgaggaatgagaagatgtggatgagagggtaggaagctgcagttttgtgggaggagtgagcccaggggcctaatgcacagcgtgaggactgtatgtagtaacaacattggattgtttactggtaatttgcccagagggtgcctctaggagagggtggaggcagaggtgttaactcttgaccacagtggccacctcagtatgcatgtatgtatccaacatcatgttgcacgcctcaaatgtacatccaaaaattttacaaaatgatgagttggattttgttatctgctttaaggatgtccattttattactgcatggatgcrtcatgcaacaggaagtggggtgtgtgaggcgtgaggcagggatctgggttcaaggcctgaaagtatgtaaagctgctcagcacrtgtgactgcgggtccccaggcaaagtagcttagcccacatgactgcacccataactgctggctttctgggttctaggcttacgtgatcagagaccaggtttgtttttgcccagcccaagtccagcacacatgtggcaggtagctggcttttcccaagcatccactggaggcccctggatcaatgcattcagggcagtgtcttgggaaggatataaactgtgcagtggttaaacagctggtacttggactgtgagagctgagcctttcagtgcttccaagtactgactctttctaagcctcagtttgcttgtctctaaagtaagcatagcaataatgccttctttgtagtaagatttaatgtgatactgcaaataaaatatttagtacagtatctactaaagattagatggcatagattagatgctcaggaatgttagtgaaaacagttatcataatgaaaaaatgccctcatgagcttctgtctactgcagggataaagtggtaaataaatgatgtgtacaggagatacagtaagggagtaaggggtgtsgtatgaatgaagaaccaagaaagcattttaagaattcaaaggggtcacggggtgggaaagaagagacatccagtgggagaatcragacagtctctgggggagtaatcatgatggatcttgataggactggatttgaaggctggagagccaccagagtgtcacttcgcacaaactctgcaagatgggcactcttagtatctccacatacaaggcccaggagaggaggcccagcatgctttaggaaatgtccacagccacacagctgattggtgctggaatctggacttgtatctcagcagcttagctccagtctgcgataagaacaccatagcctctgtaactagctgtgttatcctaagaaaattacttagcctttctgaacttcaactcccttatctctaaaatggrgataatacattgatctgaaggtcaatgataatgagcataagggtgtagcacagaatctggcactggtgatatttactcattggcatggcaatgatagcgatggtaaggatgatgatggtgatgatgaagtgattgtttactaaatggcatgccaatgatggcgatggtaaggatgatgatggtgatgatgaaggattatttactaaatggcatggcaatgatggcgatggtaaggatgatgayggtggtgatgaaggattatttactaaatggcatggcaatgatggtgatggtaaggatgatgatggtgacgatgaagtgattgtttactaaatggcatggcaatgatggtgacggtatggwtgatgacggtgatgatgaagtgattacttactaaatggcatkgcaatgatggcgatggtaaggatgatgatggtgatgatgaaggattatttattaaatggcatggcaatgatggcgatggtaaggatgatgacggtggtgatgaaggattatttactaaatggcatggcaatgatggcgatggtaaggatgatgayggtgatgatgaaggattatttactaaatggcatggcaatgatggcgatggtaaggatgatgacggtggtgatgaaggattatttactaaatggcatggcaatgatggygatggtaaggatgatgatggtgatgatgaaggattatttactaaatggcatggcaatgatggtgatggtaaggatgatgatggtgatgatgaaggattatttactaaatggcatggcaatgatggtgatggtaaggatgatgacggtggtgatgaaggattatttactaaatggcatggcaatgatggcgatggtaaggatgatgacggtgatgatgaaggattatttactaaatggcatggcaatgatggcgatggtaaggatgatgayggtgrtgatgaaggattatttactaaatggcatggcaatgatggygatggtaaggatgrtgacggtgatgatgaagtgattacttactaaatggcatggcaatgatggcgatggtaaggatgatgacggtgatgatgaagtgattacttactaaatggcatggcaatgatggygatggtaaggatgatgatggtgatgatgaaggattatttattaaatggcatggcaatgatggcgatggtaaggatgatgacggtgatgatgaagtgattgtttactaaatggcatggcaatgatggcgatggtaaggatgatgatggtgatgatgatggtgaagatagtgatgatatggtgatgacgatgatggtgatgatgatgatratrgtgttgatgataacaatgatggtgataacaatgatgatggtgacggtgatattgacaacaatgatgatgacaatgaggatggtgataacaatgatgatgatatggtgatgacaatgatggtgatgatggtggtgatggtaatggtaatgatgatggtgatgatggtggtaatgataatgacaacatgatggtgatgacaatgatggtgatggtgatgatgacaacaatgatggtcgtgatggtaatgataatgatgatgagatgctgatggtgatggtgatgatagtaatgatgctgatggtgatggtgatgatagtaatgatgatgatggtgacaatggtgatgatttggggtgggggacagaaatgagaaaagatggagttaggggatgatgggctcacctgcccttttggccctccagttctgtacttgcatattgaggggcttggtctacctggtgttgcccaaatgactagaaccatgtaggaagcttataaaagtacacagatccagatcctataccagactgaccaagtcggcatctcccatctggggctttggggtttatggttttagtacagttgactgtaatgtgcagccaggctggggaaacatgaaactaatgatcttttaagactcaagctccaatagcttgtggttctgagttcaaatcatcactgctaaaatgagcacaagggaatagaaccagttattcgtgctgaataaaataaatgtaacccccaagttgttgcactgctatttgaaataatttatgttattgattttcttcaataaaactgagctgtgtrtggatttgcctgaaggggtctgtgtcccaaccttcaactcatcctctgttttcctggatccccacacaatcgtaggcagcttagcttgtagttttgcggactgtgagctggacatccttcctgtgtttgaaaatgaacctgtcatcagcacaggttttacgtgagaaacacagggcctgaggcagctatatgacacgtctcagggtggaaggaggggagaggaattcattgaggarccactcctttttgtcttagttttaaggcagtaaatgacttgtcatcctcaggaaagctaacaggcaggtgttccctctttctctaccaccattttcatggccgagacaggaccaggcaccccttaattttcacatatcatctctaggactctgtgtgttttctgtcaaatgcaagtacggtatcrcatcatgtgagagcagaaggtgtgacagaggccgggtgtggtatagatgatgccagcacaccagacaaatgccagatagtagaagccacaggggcctccggtgcatggcgtctgagggtctttatgggcctgctgggagggaggtggtcaggagcatcagcccgctgtatgaggatctgcactgcctttgagaagtgacatcctgggataaacaagctcacccaaactcctccagaaagaacccaacaatttatttttatttggagatatagggcgagtgttgggatcaaagcctggggcaagatggtcccagagaggggccctggtgtgtggacctagaaagcagagcagcacagggcgtgggcgggtcacgcgggaggaagcacagagggtctgaaagcatggaaggagaagtacgaaccgaagcacccaggcggttctatgcaaggacgggaggcgttcacccaagcgccggctcctgcagcacagggcgtgggcggaagcacagagggtctgaaagcatggaaggagaagtacgaaccgaagcacccaggcggttctatgcaaggacgggaggcgttcacccaagcgccggctcctgcagcaaggcagggattctctgccatggggtgagtatgggttgtttccttggaagtcacaaatatgccagtgtctttaggctcagtaactcagactgtaggaacccacactaaagacgtgtttttaaaatgtgggtgaaaaataattgaaagcacgtttgttacagctttatttataatgttgaaaaactttaaaacaacccatatgaccaagcatagcagggaacagtgcagtcagcctctacagcaggtggccaagaggctctttccatggttccgggaaatgctcgcgtgtagtacccagtgggagtggcaggagacagccccgaggctacagaatgaatttgagtgctttggaaaaagtacgtaattatgctttggaaaacactggaagaaaatgcacctagaatgatattttttttcaccattttctgtatgcttcagtttttatgctgtaagattttttttttttttttgagacggagtctcgctctgttgcccaggctggagtgcagtggcaccatctcagctcactgcaagctctgcctcccgggtttatgccattctcctgcctcagcctcccgagtagctgggactacaggcgcctgccaccacgcccggttaatttttttgtatttttagtagagacggggtttcactgtgttagccaggatggtcttgatctcttgacctcgtgatccacccycttcggcctcccaaagtgctgggattacaggcatgagccaccgcgcccggcctttatgctgtaagattttattgytcatagaaccaagaaaaaaatgaaagactgggaatttggaaatttgaggtttcttctatgcttcttgaccaggtcacttctgatcttaagtgaagccacatgactgtcgggcagaatcctccatagtagaaaggaagagctgttatttctctgcagtgtgtcttgggtttgaggatgttgtagtttgtgcaatgatggtctgcatctctagaagatttttcctaaccaactttatgtggatcagctgacttttcagctagctgccagcgtgcacacgtttctctctgtaatgtcttctattttgaggtactctgtgctttactggaactactatctgttcttgtatatttctaggcaggctttgccagccaaaggtgggtggaacatttcttgcatcaacatcagaataagctcgatcatgaacgatggttgaggaagggagctggggccrtggcttgactttcccatgggaccgtgcaggacagagcagatgaattctcatcagatggcactgcgtatgcttggtgactgtgagytttcatttccggacagctggatgaccctcctgtgctgacggcacacagcccccgtagcaggaacatgtagatagagtcccatcctggagctggatgaccctcctgtggtctcggcacacagcccccstaggaggagcatgtagatagagtcccattctgcagctggatgaccctcctgtggtctyggcacacagaccctctagcaggaacttgtagatagagtcccatcctgtagctggatgaccctcctgtgctcatggcacacagcccctgtagcaggaacatgtagatagagtccgatcctacagttgaatgaccctcctgtgctcttggcacacagaccctgtagcaggaacttgtagatagagtcccattctgcagctggatgaccctcctgtgctgacggcacacaggcactgtagcaggaacttgtagatagagtcccatcctgcagctggatgaccctcctgtgctcacggcacacagcccctctaggaggagcatgtagatagagtcccatcctgcagctggatgaccctcctgtgctgacggcacacaggcactgtagcaggaacttgtagatagagtcccatcctgyagctggatgaccctcctgtgctcacggcacacagcccctctaggaggagcatgtagatagagtcccatcctgcagctggatgaccctcctgtgctgacggcacacaggcactgtagcaggaacttgtagatagagtcccatcctgyagctggatgaccctcctgtgctcwcggcacacagaccctctagcaggaacttgtagatagagtcccatcctgyagctggatgaccctcctgtgctcacggyacacagmccctctaggaggagcatgtagatagggccccatcctggagactgtggatgttgccatgctcctgggtttctcggttgcctcttggtggttctatgatggagaaacggcagggcccagcaccatgatgtgggcagccacagcggctggacaggggccactggacatttagggagatcctgtgacacayaggctgtggcctttctccgagtcatgtgtgtgtggccctcagggtagtgggagaaagagaagctatgacatttggactgaggcgtgcatgggtttgcggctcagtatagagtaataggtaggggtggtgcagagccgacgtccttttgcgggcccctggagcccgttcgtcccaggcaggggctctggattctggatcccgttcgtcccaggcgagggctctggattctggagcccgttcgtcccargcgggksctctggattctggagcccattcatcccaggcagtgggggctctggattctggagcccgtttgtcccaggcagtgggggctctggattctggagcccattcatcccaggcagtgggggctctggattctcatctgggtgttgtggtgcagcatgcatgtgtgcttgtgcaactgtgtgcacttggagccacagcctcaagccttggtgtcttcctctggacagtggagacatcagcacgtgtggtcccaaagtcctcgtggccctgtgtgtgcagcaagtccagcccagggcagccacaccaaggctccggtgtcaccctgtgatggccgcggcaccctgtcctctctctcctgtgcccccacagatgttgccrtctcctgcctctcgtgtcttccccacrtgtgtcctttgccartgctccctgcagtttcccttgtctggcctgtgctgygtggagggtgcacctctgaasatcacgcagtcctcagggggccctgggatcaaaggtgtgtccacggttagtgtgctgaggtctcactctgtgctkgttgctgggactagaaggggaaatgaggcagagtctctgctcttaggcagcgtggagcccgcccagcctggtgttatgggggtaccrgcttcacagtaggatttggatttgaatcccaaatctactcagtaaataactgtgcaactttcagctctccgaggtgtgcagtggggacgatcatggttctggctctgcagggctgttgggagaccgcacgagagggtgatgctggtgtcagggctccggcggtcgacttcgtgggacatcatggggctgttgggtgggggcgtggttttgcattttgctgactattagagcttttaaaaaccgggggagctttaaaagatccgggtggtcaggccacacctcttgacaaatcagaattcagggaatgaggccagtgtcaatatttctaagacatggcagcttttcccccaggtggccgtggtaagctttgggagctgggggccgagcttctcagcctgtgtcagcatctcctggacatcccgatggactgcagatcactcgcccggcccacttyctggtgcactggtctgagcattgtcctttgaaaaccaccagatgtcggggaaataacgtttgctgtggcgtctggggcaggaaaggaggaagcggagcacaggccaagctcggaggatgggggattttgctagaagggtatttaataaggtttgctgtgtttcacactgagggacgcataatggaaccctgggcactgcagagctgtgaagtgcccaggagacaccaaattaactttctcttagagctttcacctcagttttcaaccacgtcttctcactcccaatttctaaaactcccaggagacccggaacccttccaaatggatgaaaattcagtcagaggtgtgaagttttggccctgctgagaacactcagggtgtaaataatgaacttggaaggagttttgacggtggctttactgcgactctccccaggccaggctcgccctggagggggaggtctggtgttaacgcccctcaccgtgygctgactggggccgcgcatccgctgtgktcccgcaggccgaggtagcacctttgctaatgaacttggaaggagttttgatgctagttttactgtgactccccccaggccaggctcgccctggagmgggagktttggtgktaacgcccctcaccgtgtgctgactggggccgcgcatccgctgtggtcccgcaggccgaggtagcacctttgctttcagggctagtggtgtctgcttatcaaggccagggtagacacctgcccgctggaagtgtccagagacattgcacccgagatgctgaggagccctgggagggacacggtttcttctcattggggattctggggatgttcattggagttaggaggaatgcagagcgtggatactgtgcaaacagataaggacgctttcaggaaataagcatcaggaaaggggtcagaagactcagcctggattcttggtggctcatcagattcatagcaaaccacaaacactgaatccaccctgcgtgcgccattgctgtgtagacgtatgatggaccctccttggatattaattcaaacaaattaactacaagatgactttttttttaattaatggaatttagcactgaccggatactagaacattattaaagaccagttgctgttaactaatgttgctggtgtgatactgggtttgtgatgacattttttaaagccctcatgtgggtgagttgtggtgatcctggtgctgtgggagatggaggcgggggaatcattgagcccaggaggtggagrctgcagtgagtcgtgattgtgtcaccgccgtccagcctgggcaacagagtaagaccccgtctcccctaaataaaataaaatgagataagtcctcatttgctagagatacacagaatatggtgtagtagattttctctaactgactccaccctcaaccctggaaaacagggaggggtggcaggggagacggatggagtgaaacatgagccactgcagagtgatgggtggccatggccgatggcgtccgtgccgttatcttctctgcggagcaatggggggccgtggccgatggcatccgtgccgttatgttctcygcagagcgatggggggccatggccgatggcatccgtgccgttatgttctctgcagagcaatggggggccattgccgatggcgtccgtgccattatgttctctgcagagcgatggggggccgtggccgatggcgtccgtgctgttatgttctctgcagagcaatgggtggctgtggccaatggcgtccatgctgttatcttctctgcagagcgatgggtggctgtggctgatggcatccgtgccattatcttctctgtggagcaatggggggccgtggccgatggcatccgtgccgttacgttctctgcagagcgatggggggccattgccaatggcgtccgtgccattatgttctctgcagagtgatggggggctgtggctgatggcgtccatgcygttatcttctctgaagagtgatgggtggctgttgtcttctccgcagattgatggggggccgtggscgatggcgtccatgtcgttgtcttctctgcagagcgatggggggctgtggctgatggcgtccatgctgttatgttctctgcagagcaatgggtggccgtggccgatggcgtccatgccgttatcttctttgtagagcgatgggtggccatggccaatggcgtccatgctgttatgttctctgcagagcaatgggtggccatggccgatggcgtccatgctgttatcttctctgcagagcgatgggtggccatggccgatggcatccatgctgttatgttctctgcagagcaatgggtggccgtggccgatggcatctgtgccgttatgttctctgcagagtaatgggtggccatggccgatggcgtccatgccgttgtcttctctgcagagcgatgggtggccgtggccgatggcgtccgtgccgttgtcttctctgcagagcgatgggtggccgtggccgatggcgtccgtgccgttgtcttctctgcagagcgatgggtggccgtggccgatggcgtccgtgccgttgtcttctctgcagagcgatgggtggccgtggccgatggcgtccgtgccgttgtcttctctgcagagcgatgggtggccgtggccgatggcgtccgtgccgttgtcttctctgcagagcgatgggtggccgtggccgatggcgtccgtgccgttgtcttctctgcagagcgatgggtggccgtggccgatggcgtccgtgccgttgtcttctctgcagagcgatgggtggccgtgsccgatggcgtccgtgccgttgtcttctctgcagagcgatgggtggccgtggccgatggcgtccgtgccgttgtcttctctgcagagcgatgggtggccgtggccgatggcgtmcgtgccgttgtcttctctgcagagcgatggktggccgtggccgatggcgtccgtgccgttatcttctctgctttcgtgtatgtttgaacatttctataataaaaacttaagtgaaaagcttactgtgctggctgcctggaggtgtggtgtttctgttcattttgtttttagggtgggaagtagtgggattgggggtccatgggggccatttcttgggttttcctgaagtgggttctgtgcttggcatcatgaagcaagtggagcgtgtgtttgctccatgcctgtgggctgcgtggaggcagcctgacaaacacatttcgaggggcccccggggggtcgctgaggctgtgtatgtctgttccatgcaacagccgtcatctctgtttttgaacacattgacagtgtgtagtctgcttggggggatgttcgaggtcaacagagtggccaaaagaggctctctcgtcattgcaatgatccacactccactctgctgtcactgaacctgcccccaagcctgcaccctcttcatctcttctttgtctrtagcaaccatccccaatcctgacatcagtgattgtgtgtgttgtgtcttgtctgtcctccatagcaaccrtccccaatcctgacattggtgattgtgtgcgttgtgtcttgtctgtcctctgtagcaaccgtccccaatcctcacatcagtgattgtgtgtgttgtgtcttgtctgtcctccataacaactgtccccartcctcacatcagtgattgtgtgtgttgtatcttgtctgtcctctgtagcaaccgtccccaatcctcacatcagtgattgtgtgtgttgtgtcttgtctgtcctccataacaactgtccccaatcctcacatcagtgattgtgtgtgttgtgtcttgtctgtcctctgtagcaaccgtccccaatcctcacatcagtgattgtgtgtgttgtgtcttgtctgtcctccataacaactgtccccaatcctcacatcagtgattgtgtgcgttgtgtcttgtctgtcctctgtagcaaccatccccaatcctcacatcagtgattgtgtgcrttgtgtcttgtctgtcctccatagcaaccatccccaatcctgacatcggtgattgtgtgcgttgtgtcttgtctgtcctccatagcaaccatccccaatcctgacatcggtgattgtgtgcgttgtgtcttgtctgtcctccatagcaaccatccccaatcctgacatcggtgattgtgtgcgttgtgtcttgtctgtcctccatagcaaccatccccaatcctgacatcggtgattgtgtgcgttgtgtcttgtctgtcctccatagcaaccrtccccartcctgacatsggtgattgtgtgcgttgtgtcttgtctgtcctccatagcaaccgtccccartcctgacatcggtgattgtgtgcattgtgtcttgtctgtccccacctagaatgtgagtttcataggargagacttgtctgctttgctgagtttctaagtgtctccgtcggttccctgcacatggtcagtgcacaacaaatgtcagttgaatgcttagtacttaggagacatgaggctttcaattttcctcagttaatttgtrtgacagtaatgcatatatatggttcayttaaaagccgagtaatatagggcttaaaataagaagcaacagatcctgcccctctttcctgagctcaccccccacacccaggggcaacagtagcctctcccacgttgaggtcctgcggcagctgccgcttttccatatggttccacmccatctcatcaggagttgactcagtcctcctctgtgtagcccctgtggtgccccctgcactgtagggtgaggactgtcctctttcaattcccctaygtccaggctgtgttagccaaccctgtggtgccccctgcaccgtacggtgaggactgtcctctttcaattcccctacgtccaggctgtgttagccaacatttagttttcacactgtcaagttaaaagcatcatgcccagccctgcagctgcagtgatgggtggatcctcggggtgctccctgtgttgcagctgtaccagcgttgattgcagacaagccgagtggggccctctgtgcccctgagccacggggcaacagagtaagaccccgtgttactctggaggagaagactctttgtgcagttccaagagatgctcctgcttcatcctgcaacagccgccccaaatgtgccacttctaactgtggtgttgggactttctcttcttgcatagtttttctttgtgtttcccaaaggttctggtcacttcctttcctttgtgtctccctcctcatcccctcctgacctcactcactccacctgtcttatcgagccccccaagcccagaggtgtccgctggaatcctggctctccagcccaaggtcaccttgagatgccacagtctgtgagtgggaggggaaatcggtggggtggcaggaggccgcccgggacaaggttgcaggggcaggtgcgtggcgtgctcagagctcctgggtgaaccarggagaatggggaaggccttgaggagcctggcgacggtgaacccggcaggtccatggtctccactgggagatggggaggacccgctgggcaggggagacagtgcttctgggtgagaaggtttaattctgtaaggatatgaattctctctgaataaacctatacatgtaagttatcacaacagcatattaacaattttttttkaaattaaacgaactagctttaaagtccaggttcagacacaaacatgagactaaacagaaaagttatgaaaaagagaagttgtgtgtggggcgttgagtcttgcacactcagtgctttgcagtgatgggacacttaagccagagtggggaacagacgggcagattgaagggaaagaatagaaagtctagaaatagacccaaatgcgtatgggtatttggtatatgataatgatgacattttaaatcggtggggaaaagatgtattattcagtaatgatttggggacaactggccagacatttggaaaatacatagctgggtccctcccaaactccttaccccaaaataaaatccagatggcacagagacttaaaaatataatggaattttacaagtactggaagaaaacgtgggggaatttttaataattttgcgatggaattaatttttttaaggaagacagcccaatatctaaggaaattaaaattcacataactttaactcaccagcctgactcctgggaagttatgtgatggatgttcaggcctgggtgtaaagaaccaaatgcgcaatgattctgtgaaacattatcataggaaaaaaccgcgagcgttctaaacacccttcaagttgtggttcatcttcaagacggagttaggtagatgggctgacacagaaggacctcaagacattttgaaataaaaaaggaagatgagaacagctggaatccatattagaagaagatgaacctggaccgaatttctttcggagacaccaactcctgtgctcatgggtgtgaaaggcaagactataaaggttttcaactgagaatataatgtttcatgactttagggcggagaggaaggttttgagacaggacacaaagagtgctaattgcaaaggaaattactgataatttcaactatattaaaatcaagaataactcttagtaaaaaagacaccgtaaagagaattaattaaaagacaagccacagaatgggagacaatattttcaacacatgtaaatgacatgtaaccgacaaagatctcacgttcaaaacagagaggaccctgacaaatcactgagaacaaggcaacgaaggaaacatttgcaaaacatttcagaagttctaaggagaaaattcaaatgactgagaaatacgtaaaatggtcttcaacctaattattaaattggagtgatgaagacggaagccgtatgaaattcagcagctcccctactagacgggcaaaaaccggaagcaccagctccaggtgcagctgcgacgtggggcggggagttcctggaagcacctggctgtgatacacaacctctgagctcctcgggggcttggacagcaggtgggcaggtgtgctggaatgtggagaggtgtgtttgctgcggctgaggtttcgctccttgccctccacgcagcagaagcacacgtacgcctggtcagggagatgcgcaaggaagcgcgtaggtggcatcgtttacagtctccccaggctggacgtgacccacatgcactttggtggtggaggagaggaagattattttattttcatacaatggaacagtggaatttagccatgacggggcgactcggatcatctcacagacatgaagctgagtgaaagaaggaaggtgtgaaagacgacaggcccygtgaatctggtgcagaggcaggcgcggccrtgagcacagcttccatcaagtcggcggtggctccccatgaaggtgcagcaggggtgggggttccagctgctggcgggactatttcttgagtgctgtttggatgaatattcacttaatattgtttgctatacgatgcgtttttgtgygcatttctctattatatctatgaggttaaaaaaagcaagaatgaatctcagttgtgtttcaccagtgtgtgtgtatgtgtccttgtgtgtgggaagacattctctgaggcagcggttatggactgaatgtgtctcattgaactcagtgtgtagaaggccaaacccccaggggatggtgctgggaggagaggcctttgggccgtgattgagttagatcacccgtgagggtggggctcccacgatgggataggtggcctttgggcggtgattgggttagatggggtcttgagggcagggcttccgtgaagggaccagtgctctcgtaagaagaggaagagtcctctctcctccaygtaaggacgcggtgagaagccaggcggaggccatcaccagagcagactgtgctggcacccccatcccagacttccagcctccagaccatgaggacgtttctgtgtgagtcacccagtctgtggcaccacggcatcctcaccaggttcatctgtgctgtggccaccttggattcgtctgtactacagcaacgttttgtgttgtagctttgcctttgcttaactttgtaaaccaaatattttaggaagaaaaagaggtttagtgttcctgtttgccaggaaaatcacaagggattatgcgattgtgaatgaactaagggtcaccagtgcaggggctgcgggaaactgatgtgtgacrtgctctccactcatcctggctccattaccacactgaagtggcatccatgagtttggaaatcactaaggcaaagaagtaagggctgaactcctccaaatgttcctgactatgaattaagcctcacgggttcacttctgcctgttggtgtttggtctcggcccgcgctatgtgtcttgcttctgcctgttggtgtttgtttggactcggcccgcgctgtgtgtcttgcttctgcctattggtgtttgtttggactcagactgcgctgtgtgtcttgctgttgtgggaatctgtgcatcgtcctctcttggtgactcctgagccaaggctgacactccactcttcgagcaaactgaactatagcatgattgtatctgctgctgctccgggagggccctgtgggccgaccaccctcacctgcccttgggccagcccttgcttcctctggaagcttcttgagcttgagttgtgggattgacatgtacctggaattgttggttttggtatctgtcattggagacaccatccctaccccacgcatgacctgggagaaaacggactttgacgtttgattgttttcagtgttcactgggagggaagagaagtcaggattacttttcctctggtgtgaaagtccctggaccctaaacacaccctgttgtccacaggtggtgccgagtcccacaaaggaacctggaatccagctgagtgggcacgtgctgcctgtcacggcccttcatgtcctgaacatctgttgagaggaggcgggggtgtcaccttaattccatcttggacaccacagtgacacaaagtgcaaagtgccgtgcccctcatccccacagatatgtggcatcccactggtctcctaaccacccaacgccgttgctcctgaccattggaaacgctggtggggctggagcacctggacagtccagtctcgttctagtggctggactggagtggggttgccttgaacccgtcttaggctggaaatgcccccagcagcagtgccaggggaactctcactggggcctgccctgggagccccggggaacacttgtcagttcagctctgaccttaaggtgggactgccccatgcccttggcccaggagtgggagctgcaggaggagcccctcatgctacggccctcccgctgaggggctcccctgggggcctcaaattcagcatcaggcgccagtgaagactcagctcctctggaggggaccccctccccaccccaccctcctgcactgcagcgctgcccagacctgggtctgcggagacttctgtttgcctctggcctgatgaaagcagtgtggaaaccaacctccctcctcctccccagatctcttctctttttggggggttttcatgctaacttactattttctctaattaagaagcaatacatggctattatgaaacatttagaaaatgtataataaatactaaaataatgttaccgttctgatttatatccttccaagtccacttctctctgtgttctaaggatgattctcagacacccagcctgctcctgtgtctgggccactctgctgggggcatgttgttgccgacctggcctgtggccttccctgtgagattcatcctgggagtggtcccagaaagcagccctggcggtggagtggcyggagtggggcacgccatgctgggcttggcttcaccctcagcagtgaggccctcttgctgccctgctgagtcggcacctggcctggcccagcatcctcgggctgacgatgatgccgggctgagggcctgtgtcctgctggcatttgccctgtgccgtgtggctgggtagcatggccaggagccggggtggggcaagaccgtggcttgtcatttccaaccctctgaggcccctttgtggatggcagcaggggcttcagcactgcccccgctctcggctctgctggtgctcgtaccccggcacctgcgcagagaggtcagctccctggctacggggcagccttcgtcttcactgcccgcttggctaacagcttgacgcagcccaccactggcccaggccttggagggatgtttgctttccaggggcctggcaggacgcaaggcaggccgggtacccgtgcaggtggctttgtttcctggagaggtggggaagaggctctggcagcgggagcaagctgggcgggtcggccttatcgggccgcgtgggcagcatgtgtggctgagccaccgggctccctggggccctgctgcttctgggctgcccagctgggcaggtggtgccgccctggcctgagtccgtcagggcctaattatggagacgggtcttgtgctctgtagtggttattagctgccttcctctttttttttggtgccaaagaattccatttggggaatttatacagccaattaggtatttagctcaaggcaattaatggctggaatgcaagcattagctaaaacctaaattggaattcatacatccacgcttttgcttaacggtggaggctgcagggaggcaccgagtgttgtctggggagctaggagaggctgcccaggcccagagaggaactccagattggctgtggattcatggctctgtccttgcttgggaaggaatgtttcagtgtttcagagcaaaaattttaaatctgtttgacaatcagaggccatcctggtcctgcctggagctgctgttggcctgccccacctggcatcctagctgcgtccttactgggcacgtatgtcaccgccttcatctctttcaaagccacccgtgggcttctggtcatattgtgatgaccctcgaaagtgacggatgccgtgaggccgtgggaacaggagctaggaggctgcaggccggccgccttcagtccacagaagccagatttgaggtgggttccggatgtcatgggtgccctggacaggtggctgtgtgacagcccagcgtgcctgatggtggacagaggctggggctgccatggggctgggcttctccccagacagggagcagtggagaattctcaccaaaaatccagatagatgaaaccaaacaacaaaacttactgcttttctcatcaaccaagtaatctctgaggaaattacaccagggaccattggattttcaagctgctccgtgtgtccatggcagcccaggcagggtccaggtggggtctgcccgccgggggcggctgtggcccaggcagagtccgggtggggtctgcccgctgggggtggctgtggctcgggtgggtctccgtgtgtccattgcagagcctgggtggggcctgcctgccgggggcagctgtggcttgggtggggctccagctctcacgacagactccatcgtgagtgggcccagcgtggtccgaccacagcaacacctcatactggcctgggaatttccacattaaaatatagttgaaagtattcaatttaatgtaaaattaaaatgtactttttcttacctatagcttatagattgggggtaatttttctctgtctctcacacattcaggcacacacccaccccataaacagtccctcaacctctaagtggtttgcaaggacagaatgtgcccaggaagacctggggcgagctgggaatccggactttgggcaactgtgtgttggtgggctgggtggggcaggagcctggggtgctggggcaccagggtttacctgcccacgctgagtgtcctgggttctcacgtgtcctgagttctcacgtggggtggtccgaaggctcacctgggcgcccgggtttacctgctcatgctgagtgtcctggcttctcacatgcggtggtccgagggctcacctgggcgccrgggtttaccttctcacatggggtggtctgagggctgacccggaggcttctgagcactgacatggtcttgccagtgtccactgatgatgcgtctgctgctctgtggctcacggggacaggaggaggtgggagcaggagccatctggggcaaaggagggacaggctgacttggggcagagcrccctctcagggtctcctggccccaccaggcagcatagaccccaagatgcggcaggaagctgttcccttgatgagcagcaggcggctgtctgcgttcagccctgcacctttgcccactcattgttggaggacggccccgttatgggctggggcagaggcgaggggtgggtggagattagggccagacgaacctgaaggccctccagagcctctgacctgttcccgagaggccgcggggtcactggtccggctcaggctctgccaaggagcctccttggggtttctggcgcctgcactcagggacggcaccacctgcgatggaggctgctgtgcagtgtagagtgtggtggaaactccctgcctgggttgcagacggggggatttaattagggaagggatccagggtgaggacagtcagggcagaggtgagcaggtgggggcgcttggctcttcctttggtggtgagaacaagctcagggccgagtcagccacacaaggcttcaggctgtgcagataaggaagggctggccagcctcggggacagggcagtggggctgaggggctgtgtcacccagggcctgccccctctggagacaaagccctgaggctgggacatgcctgggaggaggctcttgcccagcgagggtgaagggcatccagctctccccagccctcctggttaagcccagctcaggcccttttggggagaagtcacggtggcaggtctcacggtccacacgctgtggtgggcttgctgctgtgcagagggccgtggtctggcatggtgccccgccgggtgcggccgcgttttcaagaggatgcagggggagaattgttgatgaaagagagcgggccctgagcaatgaacttggggtgtaagctgcacagcagtgaggggacactgggggctttcttgggatcccaaaaatggccgtaggagaggacctggcttctgtgcatgtgacgcaggccctgtgggtcttggggtctgtgaggagcactgaggacgaggaaagggagacaggctgaggccatctcggttggattccacaggaaaggccgcagccagttttcctgagacgttctggcgagcagctgcacggtccgaggctttcacttgcttttcattttaggctcactctgggtctaggggggtcttggtgctgtgtctaagctgctctaacagggttttggcctgggactctgaggctcggcctcttctcacacaggtggtagagagattcctgcccccagccgggagggcagcgtcaggtttatcaaactgacgtttgcagcaggtgtggagattttgagtgaagtcaaatcaggttttcagrgagaaacaaacactggccgtgggtggggacttggggacccagtggggctgcaacaggggaggaggcgcctgggcgctggggctcacggccggctggggctcacctcagcttccyragcacagtctgtgatggcactggcgtggcctggcctctccaggacctgttaggaggtgacggtggacaggcctgtgaacattccgctcttgctggagccaggcgaggctgccggaggggtgctgggctgcagcatccctggggcaggtgcctgtctccctgcctgttggaggggtgagtggcagtgcccacaggccccctcccttctctagcacctccccgtgcagtgggagagggcaggaccctgactgaacagggccatcctgaaaggaggagaaggtgctgctggaatgacacccagagacgggtatgagcccagacacccaggacttggggtaggccagagatgggtgtgagcccagacacccaggactcggggtagggtgccacatgggagcagctctgcccctggccgtcccaggcagccccgttgctggtggccaacagtccactctgacaccgtcacccagacaaggacccccagagcctcacatggtagaggaagctcctgtgtgattcacctgctggccacaggccttggaaccctccctgctgagtcttacttttaggaaggacctcatgggcacccctggtaggaagaggtggctcgcccaggtggggacaagcagctcgcacgcttggcaggaagatttgccccacgccgctcccccatcaggaagatttgctccacgctgctccccctgttgggaggagtcgccccacgccgctcctcctgcttcctcccctccctgaggcatcctggtagccagggcagcccaggattcaacctaagagctgcatagcgtgactgaccaggcggcgggcagcccccaactcttacagacccgtcagtggggaaacagtctcgtcagttctccgttgattcattttagcctttacccagaagtcaagtttgtctgctgatttgatataaacctacccttggatttccggcaactcaggcaagaggtggcaacttcggagccttctgtgccttcggggagaagccatgcctggcgctgccctggagccgcgggagccsctgggctgagccacggaagatgggcttggagcgtcctccgcagcctccgctcctgcctctgcccacaaagacccgctcgcccagtgacctgtggccacctagtgggaacaagacatttgcaatgtgcttgttgaccaggttaagagtcattctggtttaaagggaacaaaaaaggtgtttttttgcttttttttttttttttaatacttatttgtgttcctgaaaaggcttctgtctgctttagtaccgtctttctaggccaaagactatgctctagatttataaatatttcttttaactcactaatgtgctcatttgcttggaggccctgtcctcctcttgtccgtaaggcaagaatggtggcaggagataaaatctgttttaacttctccaaaaatggaaacgtgtcattttattttctgacaaaaaaggaaacatacattcccttccgtgcctttttcatatgcatgtttcctgtaactagaattaaagcacacaggagaaaaggaagcaggcggaacgctgcatggctgggtggtgcagaagggtacaagccacaaaatcagaatcacctccttacgatcctaaagccccaaaataatcatggtgaagaacattcgggtaaatgtctgtttagatgctcttctgggcacacacataacaaaaatggaatcctgtagttctgcaaatttttcttatcacttaccaaatctcttactcctgaatgctgagtgggcttccactgttgaatactgatacgtagcatccatggcatgcaggtgccattatctagtgaaccaaccctctagtggagaaaaggtaggttgcagtgtttcttcatcatgcagatgataaccatgaataggtaactggtcactttcagctctcgtacgtttgcacatagagaataccatgcatttcagggttctcaggctcagcttctttacacattgtatgatgacattctcagctcatctttgctctcagatttttaaccatgtcaggtaatcagagaatgatttccttgctgccaccatcaccactgccatgaccattactatcaccatcaccaccactgccaccattgccatcaccatcaccaccactgccaccaccatcactatcaccaccaccaccactgccgtgaccatcactatcaccatcaccaccactgccaccactgccatcaccatcaccaccactgtcaccaccatcactatcaccatcactatcaccaccactgccatgaccatcactatcaccaccaccaccactgccatgaccatcactatcactatcaccaccaccactgccatgaccatcactatcaccatcaccaccactgccatgaccatcactatcactatcaccaccactgccatgaccatcactatcaccatcaccaccactgccatgaccatcactatcaccatcaccaccactgccatgaccatcactatcaccatcaccaccactgccatgaccatcactatcactatcaccaccactgccatcaccatcgctatcaccatcaccaccactgccaccattgccatcaccaccaccatcactgatcaccatcaccatcaccatcaccaccattgccatcaccatcactatcaccaccaccaccactgccatcaccatcactatcaccaccaccaccactgccatcaccatcactatcactatcactgccatcaccatcactattaccatcaccaccactgccaccactgccatcaccatcactatcaccatcaccaccactgccatgaccatcactatcaccaccactgccaccactgccatcaccatcactatcaccatcaccaccactaccatgaccatcattatcaccaccaccaccactgccaccactgccatcaccatcaccaccatcactgatcaccatcaccatcaccttcattgccatcaccattactatcaccatcaccaccaccaccatcaccatcactatcaccatcaccatcaccatcaccttcattgccatcaccattactatcaccatcaccaccaccaccatcaccatcactatcaccaccactgccaccactgctatcaccatcactatcaccaccatcactaccactgccatcaccactatcaccatcaccatcactaccacccctatcactaccaccagcaccaccatcactaccacccccatcactaccaccatcactactaccactgtcaccaccaccacgactaccaccacccccatcactgccatcaccaccaccactaccaccaacaccactactaccccatcaccatcatcaccaccaccatcaccactatcactaccatcatcatcaccgtcaccaccaccaccttcaccaccaccaccaataccactgcccccaccaccacccccgtcactgccatcaccaccaccactactactaccaccatcaccactaccacccccatcaccatcaccactatcactaacatcaccaccaccactgtcaccaccactgtcatcatcaccaccaccttcaccactactatccacccctatcaccatcaccaccaccaccaccctgtcactatcactaccaccatcactactgccaccatcatcaccacgaccacctccatcaccagtattaccaccatcaccaccaccattgttaccactatcattatcaccaccaccgccgccactgccaccaccaccatcattaccacatcaccactatcacccctattaccatcactaccatcaccaccatcatcaccaccacacccatagctactaccattaccaccatcatcaccaccaccactgctttcactatcaccaccaccactaccatcaccatcactgttgttgaggaagtctgcctgaagctgtgctagaaccctactgcaccagtcctgagataccacagccaccacagcctctgatttgaagcccgaatggaacggacaatccatctagcttttgggagctggacctggagcatttggtatctgaatgtcaagtctttggagggtgtgttcgaggtggcgactttgcctaccagaaggcagctttgagcatgagtctctacctttatgggctgtggccacacaccatctgttgttgcaactgaatttgggagaaatgtccactcagaaatgaggactcattagggtgagaggccaggaggttgtcaggacccagtaagactcatgtgaggatagggaaattaagatattttctaactgatttagtacagtgtgataggaaatgcagatgcctcaacatgatgtcacagaaccccaaaccaatgcctccctgggtttctcatcaataaatcagtcagccccaggcctcagtatttccacgttgcaaaattatttccacattgcagaattatttccaaaagatctagcttccttgtgggcactacgaggtgcaccccgtaaataagcctggagctccacagactgggccatcttgttggtcgttcagagacttgtcttacaatcagtacaaactgattttyatatctttactttctatgtctatggaagatgcatttaatatgcaatctttatattaatacacatcatgacttgatatttaaaagaattagagatggtcatgaacttgagttggcaagctttatctgtaaaggaccaaatgataaatatcttggctttgaaagccacaaagattactgtttcctcctcctcatcttactccttctcctcttcttcttctcttccttctcctcctttcttctctcttccccacttcttctctgtccctgtctccatctcatttttcctacaacccttaaaaaaatataaaaaccattcttagctcaaaggcttgtgagcacaaaatatctgagaaaggtctcagtcaatttagaaagtattttggcaaggtgaaggatgcatccatgatacagcctcaggaagtcctgagacttgtgcctgaggtggtcgggggctgaggcatgygcaggaggtggacgggggcctgaggcatgtgcccgaggtggtcgggggcacagtttgcttttatacattttagggagacatgagacgtcaatcaatatgtgtaagacatactttggttcagtccagtaaggcgggatgactggaaatggcggcttccaggttagaaatagataagagacaaaagtttgcattcttttgagtccttgaccagccttccagtgaatacacaattgagcctggctcagtgaatctgcatttttacataagcaataggggagagggagcaatgagatgcatttgtctcagggcagcctcagaggggtgactttgaacagaatgggaggcaggtttgccctgagcagttcccagcttgacttttccctttagcctggagattttggagtcccaaggtttgttttcctttcccaggccctacatgaaaagacaggtggggtaggtcccggggctctggtttgctgacccctggtcagagtgtctttgaggaagtcactatcagtggaaatgtcactaaaccctatatgctaatcagctgggcatcagcctaaagtgtattttcacacagcacgattcatcattagcaaattccaggaaaatcaacaacgatcagaactgaccttctcttggctataatgatctgtttgcatcggatcagatttcctgtggggaacaactagaagtgctgggtaaaatccacagaatgcctgctttggggagctgcggaggcaaccgggatttgagaggccaagatcctgttaattagcctgttttgatgattccacaatgtatatatgtgttgaaacatcacaccgtagcccataaatatgtacaattatttgtcaattaaaaataaaataaaactttttcttttttttttttgagatggagtcccactctgttgcccaggttggagtgcagtggcactgcaacttctgcctcccaggttcaagcaattctcctgcctcagcctcccagtagctgggattacaggcatgcaccaccacgcctggctaatttttgtatttttagtagagacggggtttcaccatgttggccaggctggtctcaaattcctgacctcaggtgatccgcccacctcagcctcccaaagtgctgggatgacaggtgtgagccacagcccctggccaaaaaaacttaaaaaagacccatcggaggggcactgttagggagcccactccctgcgggctgcctgtctcctgggggcatttgtgattcctgtcgaaagaggctgagaaaccaggcaagggctgtggagaagaggcagtgaaacccacagagcacttggcaacctcatagggtcatcaacacacaaatagatgtttgcattgcaaaggttaccaggccctgaggagactggatcccaaagagaaagtaggtacagaggcaatcagcacctgtggctttcacctctgacacatttgccaaattcttgagttgaatcagaggctgatcagaaagctatggaaaagcagagcaggatttctggcagtctcataatgctgaagagatgaaactggaattcaggaacttctaagaaagaggggccatcgcacacatcccaggtcccagccccggatgggtcatgccataggtgtgaggataaaccccaggtgactgagccttccaagaatgatgggtctgtcttcttgtctcaggcctcccttgagttaaggggatctaccctcgatctggctgtctagtgaggaggaaggtaagaagatagactcacccagagtctctgcagtttcatatgtaatgtctgaatttcagttgtcaagaagcaagaccaagacacaaaaacagatgacaacagtacacccacagatagttattatacttgttgcagtcaaattttaaaataactgtggttgatatgttcaagaaaataaagggtaagtggaaaatttcaccagaaaaattgattctataaacaaagtaatcaaatggaaattctagagctgaatctaataactcaatagatgggcatcacaaaacattgagtatgaaggaagagcagatgagtgagctggaagaaggtccctgggaaataatgaggcagagtaacagatcaaaactgagagaaagtacaggayggagtgtatgaggcagaggagatctgttggaaaggtctatatgtgtaggtggagtcccagaagaggagaaggaaaacagcttagaagcaatgtttgaggcgatgagagctatgatttttttcaaacctgaagaaagacaccaaagcttggattttaaaaaatctattatatagctattttaaaggtaaacaacagttgaatattggcagttttgtgtggttagttcaacctcacagaatgaacacaaagaaaaccctacctctgaacatcactctaaaattagtaaaaaccaaagtttaagagaaaatctggaaagcaagcagagaaaaatcataggaaattaatctctattgatgaattgtttcaccagaaaccatggagaccagaagtgtgatgaacctcgcatgtgatggaagaaaacaccccatcaattcaagttctctactccctggaaatgtttctcaggtataaagatgaaatcaagacgtgaccagacagacagaacttgagagactccatcaacagatgactcttaggaaaagacagacagaactcgagagactccatcaacagatgactcttaggaaaagacagacagaactygagagactccatcaacagatgactcttaggaaaagacagacagaactcgagagactccatcaacagatgactcttaggaaaagacagacagaactcgagagactccatcaacagatgactcttaggaaaagacagacagaactcgagagactccatcaacagatgactcctacgaaaagacagacagaactcgagagactccatcaacagatgactcttgggaaaagactgcaggggcttctggcaggaggaaagtaaacccacatggaaaccaggaaacaaggcaggcagggayagcagtgggaactatcaatgggttggtaaatcaacacgaatattggtggcacagaaggtaaaggagttagtgttctcaggttttggcattatccaggatgygataatgcgtgttacactaataagtcagggatccatgttcttttttgtggaaagaacatataacatgagatccaccctcttaacattttaagtgcatggcacagtattgttgatgacagccatgatctgtaccgcagatctctagcactcgttcatcctgcagaactaaaacttgatacccattgattagcaatacctcaccctgccccgacccagcccctggaaaccaccattcttctctctgggtctacgcattggactattttagatgcctcgtctaagtgaaatcatcagtgttatcttttctgtgcctggattacttcgctcagctcatgtcttccaggttcatctatgctgtcacttacagcaggattttcttcttttttaaggctgagtaatgtttcattgtctagatataccacatgtaaaacatccatccatctgttgatggacatttgggttgtggccacatcttggatattgcaaataatgccacagttagtgtgggaatgcaagtatctctttggagatcttgattttgactcttttgggtaaaaacccagagtggggttgctggatcaaatagtagttctatttttaattttttgaggaacctgtatactgttttccataaggaccttttgcattcccacaacagtatacagtcttcaccaatactcatcttttttttttctgataataggtatcctaacaagtttgatatgayagctcattgtagtgctgatttagattttgctggcgattagtgatgtcgagcatttttgttgtatacctgcagtccatttgtatttcttcttgtgagaaatgtctatttaggtccttttgcccgtttaaaaaatcaggttattttgtttttggttattgggttgcagcagttccttatacattttggacattaaccttttaaaaagttatacgatttgcaagtattttatcctgttctgtagattgccttttcactgttgattgtttcttttgcagaaactttagtttgatgtagtctcccttgtctgtttctgcttttgttgcctgagcttttggtgtcatatccaaaaaataattgctaagaccaatgtcatgaaggttttttcctatatttccttctaggcggtttacaggttcaggtgttatgtttaaggcatgaatccatttttagttgatttgtgtgtgtgtatggtataaggtaacggtccaattttgttatgtgcatgtgtgtatccagtttttctgacaccatgtgggatgtgatgtgtgttgcaccatgataaatcaaggacccgtgttattatttctagaatagccacaaaaagaatagctaacaagctaagaaagggaatcaaaataataataaaaatactccatccagaagaaagcaataaaggataaaaggraaaataaaacagatgagacaaataaaaaaacaaggtaagayagtcgatataaatcccaatatattagtaatttcattgtaaataaatgagataaataytccactcaaaaattaaagattgtcactaaaaaacaaaaccacactgcttgcaagggaccaccttcaatgttgagatataaaagtttgaaacgctggaagagaatacaatgaaaacactaccctaaagaaagctggtatatctaaactaatatacaaagtagatgttaaggcaggaagcattttcygagataaaaagggccataataaatataagggttggtctatcaggaacacacagtaattataaatttgatgcacctgatataattttcaaatgtataaagcaaatattgagataattaccggagagaataatgcacatttttatgcatgtttgtttttattattggtgtgtgtgtcctgtcatgtatttagagagacatgctgaagcaggtctgaagaacgggattaatggccttgatctaatggacacactgcaactatcaaaatagaacctgtgttcttttccagtgcacacagcatacatattgaaaatgaccatctattagacggaaatgtttygatcagataaacaaatcttaacatattgctaaagattgaaatcattcggagtatttctttggccaaagaaattaagctaaaaacaaatggaaaaaaaaatccctagaaaatctaaatgtttggaaattaagcagtactcttctaaataccccatttgtcaaagaagaaatgtcaatagaaatctgaaaatattgtgaactgaactataataaaaatacaatattaaacaattttgggaattttgggatcaagttaaagctatggttagaaataaattataaccttagatgcttttattagaaaagaagaaaaggtgaaaatgacatatgtctaaagagtgtagaaaaagaacagaaaattgaagttaaagaaatataagaatataataaaaagaaaaataatgtaatagaaaacaaatgtacggtagagagaatgaacaaaaccaatcattgcttctttaaaagatgtgaatatacacttctggcaaggctgatcaagaaaaacagaaggaaggaccaacttaccagtgccaggaatgaaaagtggacatcgctatcaatccgtatcatcagcagcttttgcctgtaaacttcagaataaagtgacaaatgtagctatgtattttttttaccctgtgatcaaataatagcactcctagatacatgtattcccaacagaaatgcagactgaggtatgcaaaggacatgtacaagaatgtgcctagcagcttggttcgtatctgtggaagctgaatatatctgtcttttatggtctagtaatcccactcctatgagtacatacccaatagaaatgcatccttaaatatacaaaaaggcctaagaatgttcccagcagcttgatttataacagcttacaactgaaataacttacacgtctatgcacaggggaatgtagaaataactgtgggatgttccatgcaattaaatactacagagcaataaaaaaccaccagctactgttgtacagagccacacaggtgactctcacaaatgggatattgcgcaaagaagccggattcaggagagcagagagtgtgattccacggacctacagttcaaacaggcaaagctgacgttcagcctggaatttagaatgatggtgactgagaggatgggggcggggcttgtgggttatgaatctatgtctgggtgggagtgtttgttctgtaaacatttgtcagggcgcggggcctcttcccccttcctcgttcctgttttcactccaggtcagtcaccaggtgtttcttttgtagcaggagtgtaagccattctagtgagggtgaggttgtcttaagctctgttttatgggggttgcatctgttctgagctggccttgctcctggaaatcccgggccaggctgcgtcttcaggcagcaccaagctgtgtacttctcactggtgaacgctttggaatgcatagtatctcaacaaaaagtttgtaaagtgatatttctaatagctgttgtttgtttgcataatactttaaacatattccaggagcttgaaaacatattatctttactgatagtctcagaaaaccttcgcaggaggctgcaggcgtttaagtgatgtttgccttccctggtagaggtggggcctgggccagagcttgcaccctccccctcctgaacactgttccaagacgacacagaggttacattttcatgaacaaaacgtttgaaatccgctatctgagctctgtgttacaggactttgtcgtttgtagtcagccctagcttgagaggtttggatgcttgttcagggaaggagcctgggatcctggagcgcccggtgctttcgccctggctcaaggccccgccgctcctcatgagtcactgtgtgtggttcccctgaggatctggggaaaacctgtgacgtctccctgaccgtgtcgtgtttctcttctccctcacacgtcattaaaggtccagcgagaactctgagtcctccccgccctggacaaggcatcccgtgagtcagccagaatgttccgtggtcctggctgcagtgattggctcaggaggggtcatgtgaccaaaggggatcctgttagagtggattggactctgaggatgctrgacgagaatctgcatttctgctcaggtgggcttgtcactgctggcacttgagggctggtgttggtgtccagcaggcaggtcagagagagggacgagcaggtcccggataacatgatggagcactcagacacagcttcccctggcaccagcctgtccctcgggtgggtggctgtaagccagtgtgtgcccagtgtgtgcccgrtgtgagccagtgtgtcctggtgtgtgcccagtgtgagccattgtgagccagtgtgtggccagtgtgagccagtgtgagccagtatgtgcccagtgtgagccagtgtgtggccagtatgtgcccagtgtgagccagtgtgtgctcgatgtgagccagtgtgtcctggtgtgtgcccagtgcgagccagtgtgtggccagtgtgagccagtgtgagccagtatgtggccagtatgtgcccagtgtgagccagtgtgtgctcgatgtgagccagtgtgcctgctgtgtgtctggtgtgagcccagtgcaagccagtgtgtgcccagtatgtgcccagtgtgtgtcgtgtgaggcagtgtgtgcctggtgtgagccagtgtgcccagtgtgagccattgtgtgctcgaggtgagccagtgtgcctggtgtgtgcctggtctaagcccagtgcaagccagtgtgagcaagtgtgtggccagtatgtgcccagtgtaagcctggtgtgtgcccagtttgagccagtgttgagcccggagtgagcccagtgtgagccagtgtgagcccagtgtatacccagtgtaagccagtgtgtgcccagtgtgagcccgctgtgaggcagtgtgtgcctggggctcacgctggctgggatcttttctttgatctgtcactgaaaacattcagataagaatttggttctgatttgcttggaatcacacagtgaagaatttgaacttgctttcctcagtccaagctctttgcatttgtcatgttctggggtcttgggtggtcctcgttagccagctccctcaagggctgactggagtcaaacatgtctgctctggttctgctcaaacatgtctgctttggttccacggtcagacacagccagggtcagatggccactgcctgggggtctccgtccagagaccattctgagagtgtggggggctcttcccccttcctcactgctgttttcactccaggtcagtcacccggtgtttctctcatagcgggggtgagctgggttcaagctgtcatgggagttgtgtctgtgctgagctggccttgcttcctggaaatccaggccgggctgcggcttcctgcagtgacacggtgtcggccccacaaggcaccgagtgggctttatggcttcactggtcccgcagccatgctgcgtctcttgtggtggagacaccaccaaatgttccctgtcaattaggacaagaagcaatgcactcccatgcagtgatcttgactctcagagcgggaatccacagggagggggtgccgcgctgagccgtgcgaggccccgcaaaccacagagcgcttctgggaacatgcccagggtccacaaaccccagagcatttctgtgaatgtgcctggggyggttttcatcttcaccagagacttcccacaagtggtaccgacttccgggtctacaggcccctcagcctgtgagcgccagcaggctgctctccctcacctcatcccatgctgagtttgtgcactctttagcccactttcaattcagttggattcttctgctgcttgggatccttacaaagcattgttgtttaagaaaacttcatgtcccagctgggcgtggtggctcatacctgtaatctcagcactttgggaggccgaggcaggtggatcacaaggtcaggagtttgagaccagcctggccaacatagtgaaaccccatctctactaaaaatacaaaaattagctgggcgtggtagcgtgcacctgtaatcccagctactcaggaggctgaggaaggagaattgcttaaacccaggaggcagaggttgcagtgagccaagattgtaccattgcactccagcctgggcgacagagcgagactccatctcaaaagaaaaaagaaaagaaaagaaaaagaacagtttatgtcccacgagtacggctacacacatcttccttttaaatgatcacttttgtttggagatttggacttgacatttcaggccattagctcaccatccatggcctgttatggaaacccactcctgcatccatctgtattmagattgcatttaataaaaaagccatgaattagtgaaaaaccagaaactgagttgagcccatctttccatatgtttgcctgctggcggtctggagctgagttctttcctctcagacagggctctgctgttgggatggccatgtgcttgagcggagggtggcaggagggaggtgggaccaggccaggctctcccaggccgggaatgagggagctagcacatcaccagcgggtctaagggtttgtggaagctgcagtggggacccagcattgggctgacggtccgtgggaasgaggcagagatggtggtggagctgggtggtgcagagagtgcctgatggcgggaaggtcctggagaagggatgctgagctctgagctgcaggaggaacagctgctaaggaccagcgtggagagcctagcaccaccttcctaaggtttcctttgtgccggctgtggatctgctggaacgtgttcttccctggagatgtkggggagctcctgctgtggagagaggtctcagatgctgcctcccagtgctctcggcttcaggaaagcctctcgactgggtgacagccccaccctgcccctgaatgggtagggcacctccgaaacacatcggttggatccggaagcatgttcttagtacagagcagttagatgagactattacggtttagcaagcgagacagccagtgctaggagtccaaagccttggtctcagttcaggcttggcyaccaacccgccacgtgcccacaggttgatgtagctggctcagctggaactcgtaaatcctcccacaccctgtttttcttgcagtaaggctgtcccggcaccagggtgcagctgggatgcccccaggacgatctgcatgagggtagctgcttttataatttccattgccatgaaaaatagctgtctttattggaaaagaccctgaaagaagcgagtaagtaacatacagacacggtgactgaacttccccatcagaaccaggaaggaactctgtcactgaactgtgactgcctccgttagacttggttcaccgcccggcccccttggatcactgactaaaaacgacccgactgtgtgaaacagaggcctggtcgagtaatggtgactctgtgacagataccttgcaggtactaaaattatacttcttaggagtttcttaagaacataagaaaattccggtggaatagtgttaaatgacaaaggcagctgtaaaagtgtcccaatactgcgatctcaaccatggagagaaacagccaatgccagcagccgtttcctcagatcggtgggttacaaataattttagttttctcctttgcagtttctgtgcggtggcacacatcgtttaaaaggacaacccggtgacttccctaagggttcccccgagggtcttgctgctgccctcgtcttctgagccaccaagaacaggccccttgtcttggatgcgctgcgagtcacgtccgacgccgctgtgccttcaccacctcatgttttattactgttaaaaatgaatgtttttccattttgggatgrgagagtgccccagctcccctgccctcttacaggagtgaatttcattcgtggccccagtttaaagacactcggattggcttgttggtttcatcataaccttctttaaacacttggtgacaggctaagagaacccctgaaatcagaatgtaagtcctcggcggagttaggtatgcaggactcagctaggctggtctcggactctgcgtctttcccggcggtgcgcaggcctcagctaggctggtctcggaccccgcgtctttcccggcggtgcgcaggccccagctaggctggactgactctgcgtctttcccggcggtgcgcaggcctcagctaggctggactcggaccctgcgtctttcccggcggtgcgcaggccccagctaggctggtctcggaccccgcgtctttcccggcggtgcgcaggcctcagctaggctggtctcggaccccgcgtctttcccggcggtgcgcaggcctcagctaggctggtctcggacaccgcgtctttcccggcggtgcgcaggcctcagctagggtggtctcggactctgcgtcttccccggcggtgcgcaggcctcagctaggctggtctcggactctgcgtctttcccggcggtgcgcaggccccagctaggctggactgactctgcgtctttcccggcgctgtgcaggcctcagctaggctggactcggaccccgcgtctttcccggcggtgcgcaggcctcagctaggctggtctcggaccccgcgtctttcccggcggtgcgcaggcctcagctaggctggtctcggacaccgcgtctttcccggcggtgcgcaggcctcagctaggctggtctcggactctgcgtctttcccggcggtgcgcaggccccagctaggctggactgactctgcgtctttcccggcgctgtgcaggcctcagctaggctggactcggaccccgcgtctttcccggcggtgcgcaggcctcagctaggctgcacttggaccccgcgtctttcccggcggtgcgcaggccccagctaggctggactcggactctgggtctttcccggcggtgcgcaggcctcagctaggctggtctcggaccccgcgtctttcccggcggtgcgcaggcctcagctaggctggtctcggaccccgcgtctttcccggcggtgcgcaggcctcagctaggctgcacttggaccccgcgtctttcccggcggtgcgcaggcctcagctaggctggactcggacaccgcgtctttcccggcggtgcgcaggcctcagctagggtggtctcggactctgggtctttcccggcggtgcgcaggcctcagctagactggtctcgtactctgcgtctttcctggcagtgcatcagcaggactttcagcctattgttttgggttcttagcagcaatgaacatgattgtttttgtcttaaggcctcaagtgatggccacatgaaggagggtcccctcctttaccgacagtcacctgatggtggatggtagttataactacagaatgccttctccgaaacacccgggccccagacctggtgagctggyatgggagattaggctgatggttaatgcctgtgggcccsgagatccccggaccttcttgagggtgctgagcacacctggcgtgggagattaagctgatggttaatgcccctgggccccgaggtccccggaccttctcgagggtgctgagcacacctggcrtgggagattaagctgatggttaatgcctgtgggccccgaggtccccagatgttctcgagggtgcggcacatgcatggccactggggccaggcagcagcatcgtgcttgactctgctctcagggctctcagggccgcgctctgcgggcgtctcagtccccggtttgaagagcattttctgaccactgggcattacgcgtgctggcatgtgtgtatgagcctgttccgtacacacatatgatttgtttgaatgtagccagagacaggttaatagaggaatcgggagagtcagttctttcactaatattcatctccggtggtcacagacgttgtccctgtttttgtgtgaagtgatgttcactcggcccccggagctagtgtgttataatcagactttgggagcaataaacgttaacaggcagagtttctgaaaacgcctcgctttgctccttgacggaattccattacagctgggggaatcgatacgacgccttgcttcattattgcttttcttccacgtgggcagttgcttaataaagcccgaagaacgggccgcaccgaaaacagaacgggatggtgccaggtgcctcccctctctggcctctctgcatccacctgtgggatgcgccttgtgtacgtcacagagcactcctgcgccacacgtaagcctgtgtccaccctggagaaatcactgggcgcctggagggtggtccagcaggtgccggaatccgacggctgcctctctgctcggagaccttggagctgtttagcctcttccgaattaatctttctcgtctaaaaaagtgaaaataaggtaattaccaccttagaggggagttgtgaggattaaaggaaatgatacatgcaaactacagascacagcagaactccgtgcaaagcagttttcaggattccattccagtgttggccgtaaagggactgtaatgtcccagtttctctttcctcatctagaaaatgaggggctggatgtggtggctcatgcctgtaatcccagcactttgggaggcggaggtgggcggaacacttgaggtcaggagtttgagaccagcctggttaacgtggtgaaaccccgtctctactaaaaatacaaaaactagtaatctcagctactcaggaggctgaggcaggagaatcgcttgaacctaggaggtggaggttgcagtgagctgagatggtgccattgcactccagcctgggtgacagagtgagactttgtctcaaaaaaaaaaaatgaggaaccagaggggctaatctctgagacctcttcccctctaagaacattttcgttgagacattttgggagtgccctgggcaggacaggcagggcactggagaggaagctagggcgggaccatttcatgtccctagggttcaccgtgtccccacgaggtcatgggtgctccccggaaaggtcaggcttgcatcactcagcaaaggaaggttactgtgggtggagggaagccccccaaatccacttccttcactgccgtgctgctcaggtctggcccagcagcaggggatagaacatggatccyggtktctcccccgtggtttctcttgggtttcttgcttgtttcccagatgagttgatgtatacagtttattcacggatcaaggctcatttctttgctatcttaacaagtgacagcgttggagataaatttgcattttgtggtgtcacctcaggcttccttgttgctttgggctgagtagcagggatggaacacctgtggtctcgggtttatcggccatggttcctatctgggaaactggcgtgggccctgattggctatcgtcaccctctcctcgctttatmtctggagagcagcaggagtgtgcagtggctttgaagcctttctttgtctctactgaccatgcaaattacacaccaactacttgtaagcttgagctcckgtgagctggccgagctcgggaagattattgagaccatgtccgaatggtggccccagaagccggcagtgtcagcccaggtgtgacggagaccacatcccaatggtggccccagaagccggcagtgtcagcctgggtgtgactgagaccacatccgaatggtggccccagaagccggcagcgtcagcctgggtgtgactgagaccacgtccgaagggtggccccagaagccggcagcgtcagcccaggtatgacatcccgtgtagctgctgaggccttcagatggcatttgctctttcatgtggactacagggtttctttttcttctttttccttctttctatcttccttttattttactttctttgagacatgtaagagtatgtgtgtgcatmtgaaatgagaatctggcagcattcagagttttccggctcaattccgtgtccagatttgaaattcagaaaatcagatggtgttggaagctgccattgatggggtttgttggtacttctcaacctgccattccagctctccccaaccaagctggccaaagagttcaagccttttgcagagacgtggatgctgtcttttgctgtttaagaacctacctaggatttgcattctgatctgcatttcttaaaaggttgactgaaattcagttccttgtagtctagctcctttgcagtttttgatctctgaggaagattcagtcagctcgtaaaattaatggattctagcaaaattgcgttttagtgatacttttcagtagatattctgtgaaaagtggatttgaagtatttctgtgatgaggctcgattattaatgcagaacttgattgccaagaaccaaactacctccctcatcagtaacttggtctctagcttcagcatctgttgcttgaatatttcacagatctgaaaatgaaggtgggcccaagttgttcagggttaagacaaactttatttttttaaccccaaaccttagggctaataaaaattctttattagaatgcccaaaggcattgatgaataggtttggtcactacttttaaatgtaaaactttttaatttcagttccatctcatttacatcaaacagagcatatggctcccaaagcagcccagaacatgctgcggagaaaactagcaatttactccacgattcagyttcatttttctttcattttcatggaaaccataagattgtttttgtgtttcaaatcaaacatgtttttgagcaaagagtacattacccagctgtcctaaaagcagaacttatcactgttcagatttaatccaagccatctgctgcgtttctttctttccatttatttctgaggcacatcacaggaaagctgcttcttgacatatctcacttggagaaactacaaagaggaaaatatggcaaaaactttcaatgtcgctttgtcgatgcactttgcataaataatgaaacgttgccctccgctcagtgttcaaaaacccagtgcttgtcaccccaactttaaaataaataggaaaactccaagaaacaaactcagccttacatgttcatttcctaccagggtgggtgtcactaatatccacaggctgagctcttttttcmagtgtgattccagtcagcttttcaaccaaaggcctgagagctgtgcaggacatgacaggtgcaccaggggaccaccagccagaatgggascaacaaggggtgcggctggccctcgattccaaagcctggactgaagatctgagccacacacgtctaatggggtacgggaatcctcagtccagaaatgaccttgaactcagatacttgagcagaggatgacatgggcagaactgagtatattgtgctttctaagatgttatgggtccgatcaagaatgggaaggtgatccctggaattggacatctctgtcaggccctgttggaacccagggcgtctgtaagccacaaccgcctgtgacctgcccctcatgcaactgccacgtctcatcaacagggacgcggaggaaactgactccgagccgtcacttcatccccgcttccatggaagacatgctgcttacatatttcacaaatgtggccggagaagggaggcaggaaccactcagtcactgggattatcttctgggaagcccactcggatgatggggagtatcttctgggaagcccactaggatgacaaggaggacctcatctgcatggctcacagccatgacagcttgggtctcagagggaagggaactcaggggcaatgcgcactggtgggattgcttatgcacgatatttgtcaagccatctctttttgtaaataactcttctcattaaaaacataaggcagctttgcaactatgctgatctcattggcttttggtgaagaagaaggaatgtgtgctggaccctgtgcctgaagctggagtcccaggtaccccaagcccaggaaaagacaaagccaagattctatgttctgaaaggagccaaatgtggctcagttgccctcaaaggagagaagatccaaggtaacccgtggtcagcaagagtcagagggctgaagctgtgcctgtggtgttggctgaagactgaggggccttttcgcgggtgggcagtctcttcctcctcactgcagctttggggtgctgatgctctgagttcagggtaaggccagctcgccgtgagacaatgtgtcctgcctgccttgggaaggaaaacgggaggaattgggagggagaacatgttcccagttctttactcactgttgtgctggacacaaatgtggcaggaacctctgataaaatgccccaaagctctggagaccttaggggtcaggtcctgtgcacaagattgtaacagtggccaacatgacagagtttcaacagatgcctgttgagtaaagaatgcaggcaccgaggttcaggcacagctcggggtccaatgctaacataggtggattgcatcaccagcactggtgtcagtgggccttttccttcaggagtgggctttgaagtaatgactgccacttcttttggatttggagataataaaataacgaagtgctgagcttccaagtccggtcagacatcacgtgtgagcttctgagtccggtcagacatcacgtgtgatcttagaaatccctgagtggtgaatgctggccacaccgagtgctggaggcttgtgaattcgactctcttctccaagtsctccatcaggtatttcactcattccagctgcagtgctgcgtggtgaggctcctggcgtgacatggaaggagggctgtgtgagtcagggctgacactcccagagcagggaatgggaaagagagcagccactctgctgccttcccatgtggaagggtctgtggagctgggcacctccgagagtcccgaggccccgtgcacttgactgagacttcctcagtctctgatgagtgattacggcagtgacagaattcttgcagtgacggaattcttgcagtgacggaattcttgcaatgatggaattcttgcagtgaaggaattcttgcagtgacggaattcttgctggtgacagcttatataatgtttgcaaaacagccgttttctaaaatggagctttccaggccaaaaatgcttgatgtcaagaaaatgacttttagctttgagatagcatctgggtctaatttcagaaaggtgggtctacacacaggttactgccaaggacacatgtcttcaggctccagaaccctgcctcaaggctggcaacaccacagctgcctgaaatgcaatatttaaacacagaaccttacaaaagatggcaagacggtcagagtcaagcacaaaaccaataccaggttgtacctcattgcatggtgaaggagaagtggcaaggactatgtgagccactggaataacttataggaaaatgaggattgtttcatgacctgtaatgttgtgaaaacgttacaaactcttataatctaagtgtgtatggaaatgaaaacagtgagtctgacaatgatgtagtacactgtgacaacacagtgggacagtgagagctacagcatcttgatgtagtacaacatgacttaacacagtgggacactgagagctggagcatctcgatgtagtacaccatgacttaacacagtgggacactgagagctacagcatcttgatgtagtacaccgtgacttaacacagtgggacactgagagctacagcatctcgatgtagtacaccgtgacttaacacagggggacactgagagctacagcatctcgatgtagtacaccgtgacttaacacagcgggacacggagagctacagcatctcgatgtagtacaccgtgacttaacacagcgggacatggagagctacagcatctcgatgtagtacactgtgacttaacacagtgggacacggagagctagagcatgtcgatgtagtacaccgtgacttaacacagcgggatgctgagagctacagcatctcgatgtagtacaccatgacaacacagtgggacactgagagctagagcatcttgatgtagtacaccgtgacttaacacagcgggacacggagagctagagcatctcgatgtagtacaccatgacttaccacagcaggacacggagagctacagcatctcgatgtagtacaccatgacaacacagtgggacactgagtgctagagcatctcgatgtagtacaccgtgacttaacacagcaggacacggagagctagagcatcttgatgtagtacaccatgacttaacacagcgggacatggagagctggagcatctcgatgtagtacaccgtgacttaacacagcgggacactgaaagctagagcatctcgatgtagtacaccatgacttaacacagcgggacactgagagctagagcatctcgatgtagtacaccgtgacttaacacagtgggacactgagagctagagcatctcgatgtaatacaccatgacttaacacagtgggacacggagagctagagcatctcgatgtagtacaccatgacttaacacagggggacacggagagctagagcatctcgatgtagtacaccgtgacttaacacagcgggacactgaaagctagagcatctcgatgtagtacaccgtgacttaacacagcgggacactgagagagcatctcgatgtagtacaccgtgacttaacacagtgggacactgagagctagagcatctcgatgtagtacaccgtgacttaacacagtgggacactgagagctagagcatctcgatgtaggacaccgtgacttaacacagtgggacactgagagctagagcatctcgatgtaggacaccatgacttaatagagtgggacagtgagagctacagcagcatctcgatgtagtacaccatgacttaacacagtgggacactgagagctagagcatctcgatgtagtacaccatgacaacacagcgggacactgaaagctacagcatctcgatgtagttcaccatgacttaacacagcgggacactgaaagctacaacatctcgatgtagtacaccatgacagcacagcgggacactgaaagcttcagcatctcgatgtagtacaccatgacttaacacagtgggacactgaaagcttcagcatctcgatgtagtacaccatgacttaacacagcaggacactgagagctagagcatcttgttgtagtgcactgtgacttaacacagcagggaaactgagagctacagcatctcaatgtagtacactgtgacttacaccaggacactgagagctacggcatcttgatgtggtacaccacaacttaacacagtgggacactgagagctgcagcatcttgatgtagtgcactgtgacttagcacagggggacagtgagaggtagagcatctcgatgtagtgtgtgtggcacttgaatccttgtctaggctgtgatagttgtgagcattctccccatggcttgctgagtgtcaatccctttctgagtctggattgccctccaacattttgtgctttgccattttgtggtggtgaagtgcctctgagtgtccctttactgtgaaggtcttattgccccatttcccctggatatcatcgtttccctcacagccacttccctgctgtgtgcggatgagttgccttccttaggttcctgcagcaccgtgagtgtcccacatggtagccagtctatgtttcccagyaggctgtctgtttcctgccccctggcctttctttggaatttcacttccagcacyatcccttttcattctctggtgcacttatatctttgtttgtctgttctttcttctgataattcacttctgcgaaatgttgtttggtttctccctgggagatgatgtggccacacagctccatgctttgctgtctgtgctgagctgagtgacaggcaccctggccaatccccatgcagccaccaatcccacatggctgttaacatgtggtggtttgttgcctacacctggcagcacactttgtactttatgtagttactcggttaacatgccatgtaattgaaatctggactgtgtggttgggggctgggggtgcatatctaaactttggccatgtatccctgtgggttgggcctgcaagggaggacagtcggatgcaatcagatcatccaccacagttgtcccaagcctggctgactatggagtgaagctggattcccattcctgggccccaaagtggaccttcacagaaggcttcctccagtgcatggggcccagggaaggcacctgtgtggaaagtatttagggatggttcaggtgtgcagtcaggcttgggaaccgtggattgtaggatttgctgtttctgaaaccaacaccaaaggtggatgtggaagagaagaaaccagaacctaacacttagattcctagaagagacaggactgtggtggctgccaccagacacgtcatggggatgtggagccccagccacagcagacacaggggtggcaggggcttctaggggaccacccagccctctgaggaatgctctgctattgaaaatccttagagacaatttatgaactactctgaagtcccttcttagtgactaaaactaggctaaatcacctgatttgtttaatttttccttaagaaactttctcatttatcaattgaatgaggaagaggcatgggtggcctgcatacttcattgagggtctttgacgaggatttgcgtgtatgggatattaatgagccattgtagggtggggtggggggacaagtcctcaacaataactctgaggcggggcccgtggtatatgcagttcttgttggtagaatgggcccatggttctaaaccctttctgtacatccacagtagctgggagtgctcagataagtctggtaagcaggccgcactccggagcagtgacatctgaatctggtggaggtggggcccaggcacctgcattttcagggtcccaggtggtgtccagtgtcatccagggctgaagcagctggtgggggcttagagaggatggtgggtagggcctggggtgacccttccaaacccaggcagcaaggctgctggctctctcccctgaggaaggaaagcaggagggtttcttgaagccacctgctacaggttgtttttgtttgtttgacgtcattcatcagctttgcgtctcttcaccaatactgtcgctggggcccagagtgtggactgcagagtaaagattaattgggaagcagggagttgaggtgtggtttctggcctcttggtaggtcaggaaattagctgtttgtatcatcagagaagtagctggttgtatcatcagagaagtagctggttgtatcatcagagaagtagctggttgtatcatcaggaaagtagctggttgtatcatcaggaaagtagctggttgtatcatcaggaaagtagctggttgtattatggctggagtgctcagctcctgttttccttgcaggcttttgtcccaggcagaggtaccttcccccgcccctcctcatgtggatgactggtagtgttttccttacagcacgctggctcattcagttggtgtgagggagctggctggatggagatgctccggaagcttcatcagtggatgcccctcccccactttcaacacagctcccagcgttcagtggagcctcgaagaatgagccacattgatgtggccagggcgggaggcgcggcacaatgccggcaattatgccagatcgaggacctcggtggggacagctttttgggccgtggaagcgggggcggcctccagcccgcatgtgagctcgtgccagcttcttcctaatgggaattctcagtgggtggctctgatgtatgacttacagctgagcccggagaacatctaatttcctttgcagctctcttcctcacagatgcaattackagtgaaatctggtccaggaggatgggatgggattctattttaaggttatttctttccttcttaggyctgaatagccattgttaaccgcccgggcaccctcctggatccgtcctttggggcttaatgctccagcccgttaattctgctctttaaattctcacaggtgactgctccctgtcagcccctttgtcttaacctcatggtttagtgctgctgtcctcactcctggtgtgccctgcatcatcgggagagctctgctatgggccgttcggggttgagcacctgattccctacgctctggaagtgcacggtactcacttggtagaggatttgctagaaccacagttctccccctgctggaacactaggaatccccttgcttcctttttttttttttttttttttttgagatagaggctgtctctgtcacccaggctgaagtgcagtggcacgatcacggctcactgcaacctccgcctcccaggttcaagtgatttagtagagacacggtttctccatgttgaccaggcttgtctcgaactcctgacctcaggtaattcacctgcctcggcctcccaaagtgctgggattacaggcgtgagccatcacacctggcccttgcctccatgtttaagggtggcccaggttgagctgaaaaggctgggtcaggaccgctgggcctggacacacaagtgcttcctgtgtgtcccacaggctccccagcacccgcaggatgggcccgttctcctagttttacagacaccaggctgagagactggggtcctcatctcccacccacagaagtcttcccactgttagtcctcccgggagaggggtgggctcgcctgctgaggtcgccatggagcccacacggggctttcccgttcaggcctcttgagccctgccatcttctgggaggggagtcggaaaaggttaaggacaagagatcctcmtctgtgttagtcacaggcccagagtggacagtggccagtttcctagttgagaagaggacttggccaattgggggccatgttaggcccactgcattttatttccttaaagacaatgttttatttttttgtgtgcattcgggttcagatgctaagtgagctgtttaggaaatgtaaacatacattcaaaattgaattatctttccttttctcgtgagcccctacgacttattacaaatgagatacaaaggattgtttttgatcttgaacccaactttggcacaaaatttgtcttgctgtggattttcttgtgggtctggaacgagcttgcatctgttatcaagtctgctcagtggcgagagggaagggagccatgttgaggagggcgctggatgggtcctggagctgaggagggtgctggatgggtcctggagctgaggagggcgctgagacgggccctggagctgagaagggcactggatgggccctggagctgaggaggccactggatgggccctggtgctgaggagggtgctggatgggccctggagctgaggagggtgctgagatgggccctggtgctgaggagggcgctggatgggccctggtgttgaggagggcactggatgggccctggtgctgaggagggtgctgagatgggccctggtgctgaggagggcactggatgggccctggagctgaggagggtgctgagatgggccctggagctgaggagggtgctggatgggccctggtgctgaggagggtgctgagctgggccctggtgctgaggagggcgctggatgggccctggagctgaggagggtgctggatgggccctggtgctgaggagggtgctgagatgggccctggtgttgaggagggtgctgaggtgggccctggtgctgaggagggcactggatgggccctggagctgaggagggtgctgagataggccctggtgctgaggagggtgctgagatgggccctggtgctgaggagggtgctggatgggccctggtgctgaggagggtgctgagatgggccctggtgctgaggagggcgctggatgggccctggtgctgaggagggtgctgagatgggccctggtgctgaggagggcgctggatgggccctggtgttgaggagggtgctgagatgggccctggtgctaaggagggtgctgagatgggccctggtgctgaggagggcgctggatgggccctggtgttgaggagggtgctgagatgggccctggtgctgaggagggtgctgagatgggccctggtgctgaggagggtgctgagatgggccctggtgctgaggagggtgctgagatgggccctggtgttgaggagggtgctggatgggccctggtgctgaggagggtgctgagatgggccctggtgttgaggagggtgctgagatgggccctggtgctaaggagggtgctggatgggccctggtgctgaggagggcactggatgggccctggagctgaggagggtgctgtgatgggctctgcagctgaggagggtgctgtgatgggccctggagctgatgagggtgctgcgatgggccctggcaggtgtgttcttggcccacgcatgttctcagccccagtctcatgtgcgcagcctcatttcaccctcacggcagcctaacgagatgggcctattgtcccctgagccacagagaagcagcccgggaggaaggccagtgactgacctgggtcacagagcagctgagtctggataagacctgggccctggcccctgagaccatgctcccatctgaggcgggtgtgagtgccgcggggcggcgccttccacctccattggcgttggttggctgcttggtacccaggtttcccaacttgaagttgagtgcttagtgtagacaaggacagcgagtgagttctgatgctgccctctgactggctgtgttacctgggggatcccatctcccacgggaaggggacccctgttcccgggacgacagcaggacttgcaggtgccttggctcccaggaggtgagccgtgagtgctggggggaccagagagtggtggccgggcatgtgcaagggcccaggggaccaggaggtgagaccccagaggctgctgaaggagctgtgaggacccagcaggggcagcagtgcgcagtgccaggccccgcacttcatcacgggaagcgactggagatgtcacctcatttcaaggtggccggaaagctgtggctgcacacatctttacgtggggaagggagaatgaacccactgggaagcgtgtgaagaagccgtgggaggcagaaacggagctgcgtttggttgtaagggatagggtgctcatgggttttgagtgcctgctctgtgaagggtcccatgacacagaaacaggtggaagagcgaggcctcctctcgggagctgcaggagtgaaaataaggctgtgccagggaggagagggccccgggttcgcaggggcagcccagcctgtccggatctctgtggcctgacaccaccaagtgaatttcctactcacgctccatgtctggggtcacctgggtgcttgtgtaccctgtccctccggggcctcccaccccatgagcacactgtcccgtcaccccttccctgtgtctccgtgtctggggtcacctgggtacttgtctgcactgtccctctggggcctcccatcccatgagcacactgtcccgtcaccccttccctgtgtctccgtgtctggggtcacctgggcacttgtctgcactgtccctccggggcctcccacccgtgactccaccaacaccccttccctgtgtctccgtgtcttctcctctccctacagggacgtcaatcactacatttagggcccaccctggatccagatgatctcacctcaaggtccttcaataatgaggtctgcgaggaccctgtttccacgtagttacattccgaggctctggctggacattcccagagaagttaagagccactcgtggttttgttatttcactttaccgaagttggggaaaccgaagcttagggaggctcaccttgctcaaagcctgtagtttgagacagactgggagcctctgcccttggtcaccccacatgcctcagagtcgcagaacttcagggccagaggaaaccttaactggagctggaagtgggctcacaggtgtctactctgtcacttcatcccacgagaaggagattaattctcctgtctgtagtcacctgggtactcggggatgagacgagggtgactctggcatcgtgacctcattctgtgtcctttcccccacatctcctgccttcgggatgacagctgtgtcctgagtgtygtgttaggttgacattttggtgtcgggagaggctctctagagagggagcgggccttgtgtggtgagggtagcttgtcagatgcttgaaggcagagagggtttggggaggtggctcagacatgggctgtttttctttttcttaaatggagggaaggtggccagagactgtggaggtcacccggatgaactccaggtctgcctgcagccgtaggaggaaaccgaaggagtgatcaggctgaatctgcggggacgcctcggagccacccaggctgttcagcgaacctcaggcagctggggctgtgggggcacaccccatcttctcaagttttcagaaaactttggaaggcaagttcatggaagctgctcaaaaaaacactagctttattattattttttaaagccagattttttgagaggcgacgtcaacacattttctcagctctttatgtcaattcttaaaacacttgccagattctgcaggacagttctgaatgtcggcatgctctgtgagggcacctgttcttcagagcgagggtctgagggggcctgcgcgatccctacctggcyccttccctggcaggtgaggttgaaagccagtggaggttttctgttgttagagacccccggaaccctcacagccaccctttggttcacatagaggaggggcttggatgcttcgtaaattctcctgccggagtttgagctgctttaaccacggtccttttcaggcatgttcataacatggaaaccagcttcagaaggcagccctggggaaattgacctgactctatctgttagcagcagccactctttccttcctcagactgaccaggtcttctgtgccctctccacgctcatgcctgggtaggtcctgggtaggtccacgctyatgcctgggtaggtcctctcctaagctgaggactgcccacctccccagcctgctcactgcctgctcctgcacacatctccccatatgctgccagggccagccctgaacacaggcaatggctggcttctggctgcagaggtcagcgtgggccccacaggatctgccatctccaggagcccctttggaggtgaggccccaggtgagccccaaatgagtagatgcactgcagtctgcatctactcattaacgtaaaccaagcattacctgcgggggcttctcatgaatgaaaacagaactttcagggtgttacgaaaatgatatgattgtgtacataaagcactgagcttggaatctggtctgggaggatgatcttttgatttttttttttttttaattaaggagagcaaagtcattactagaatgtatagcaaatatggaggttaactttgtatcgtttaagtcatgtttgtggtaacagagttttaggctgtgtttggtgtcaatgttaatatgactggggtgagtcgtgtcaatgttaatatgactggggtgagtccagtgttgacgttagcagcgttttatctcaagcatatgtgacgttgatcaaaatgtgaacttttgatccgattctccttcctaccccactggcttagttattgctgtagtccggtcacgaagggtggtcacacgtttggtgtatttctgcaaacacggaggaaacaccttatttatattatgcaatttaccttttcttatcatttggactttttctgagcccatcaaattgcttgttttatgattttgattttgcaacacagtaataaatgtcattttctggaaataagtaatgaacatctgcttcctctgaagatgcagtatgagtccaccacgtgcagttctcacaggcagggacccacctccgggctgatacacagtggtgacggttttcttcttcttcctcttcttctcttaaaagtctatttgaaaaattccactgtagagaaagctactgtaatctgctccttaagaagatttggcctaggaagaagaaaatcatcctttatacttttggcttattaaattgaaaaatatgcatagtggtgttcttattaatttattcatgattttattaatgtttaatgctgcctctggtgttgtctgctttcaataccaaagaaaatgcaaaggcacatttgatcatgtgtgtttcagatcacaggatctcgtgtgtttctcttctaacactgaaggccaccagatgtcagtgtaacttaacaaatcacatcctacatgtcaygttgacttcagcatttggtctaagtgttgccttttcctttcctatttcaacttctgaagatgaagagggactttaagggaatttgcacacaagctccatagacttgagtcattggatatcttctgaagatgaggagggactttaagggaatttgcacacaagctctgtagacttgagtcactggacattgtgggagatgcctttttgcttttgctgtttccaaacctcccagctaatcacgccatgaactcatggtccctccactgagcacggcgatggttccacatcggcttcgtggcaaggacggattccaggttggggctgcagccgggctctgcttgagcggcccagggtcttctgtctcaatccaggacccaggacgcaggatgcaggacgcaggacccaggacccaggacccaggacgcaggacgcaggatgcaggacccaggacccaggacgcaggacccaggacccaggacccaggacgcaggacgcaggacccaggacccaggacgcaggacccaggacacaggacccaggacgcaggacgcaggacccaggacgcaggacgcaggacgcaggacccaggacgcaggacccaggacccaggacccaggacgcaggacgcaggacccaggacccaggacgcaggacccaggacccaggacccaggacccaggacccaggacgcaggacccaggacccaggacccaggacccaggacgcaggacccaggacgcaggacccaggacccaggacccaggacgcaggacccaggacccaggacgcaggacccaggacgcaggacccaggacccaggacccaggacgcaggacccaggacccaggacccaggacccaggacccaggacgcaggacccaggacccaggacccaggacccaggacccaggacgcaggacgcaggacccaggacccaggacccaggacgcaggacgcaggacccaggacccaggacgcaggacccagggctgggcttgtctgcagcccgacctcctcacaggcggatgttggttctcttgctgggtctccctggagggttccttgctgacagcctgagcacgctcagccttgctcattgttcagggctggcagctccatgtttgctgtgggcgaggcctgtgcaggacagactttgtccagtatttacagcattttcctgattccatgttgagagataaagcaatttgcctggagtgcctgctctgatcctggagctctgtcatccagggtctgtttataacagcagaggaacgaaatgagccgaaacacaaatctaatacaaaaaaacaaaatcaggagcatttttgaagtttagccaggtatccaggaggcagtcagccacttatccagtggcatggggatgagaggtagtcttctagaggtgtgtgaacagggcaggtctcagggcatggtcagtgtcacatgccagcgagtggctgcagcaggactcaggtccgcgggagagactggggaggcttccagagcggcacctgccctggggaaggagccgatgatgatgcagggggctccaggcatgaccagctcttccttcctgagataagcaccactgcgggatctcagtgtgcagccacatgtctcatggatgagccaccgggatctcagtgtgcagccacatgtctcacggatgagccactgcaggatctcagtgtgcagccacatgtctcacggatgagccactgcgggatctcagtgtgcagccaaatgtctcacggatgagccaccrggatctcagtgtgcagccaaatgtctcacggatgagccaccgggatctcagtgtgcagccaaatgtctcacggatgagccaccgggatctcagtgtgcggccacgggtctcatggatgagccactgcgggatctcagtgtgcggccacgtgtctcacggatgagccaccgggatctcagtgtgcagccacgtgtctcacggatgagccactgcgggatctcagtgtgcggacacgtgtctcacggatgagccactgcgggatctcagtgtgcggccacgtgtctcacggatgagccactgcgggatctcagtgtgcggacacgtgtctcacggatgagccactgcgggatctcagtgtgcggccacatgtctcacggatgagccaccgggatctcagtgtgtggccacatgcatggataagccacttgtggtcgtggtatgcagcatttcactttgcttctgggaaggttttccgagttttccaagtgcaggctccacacacagataagtttcactgtattaagagtatagagggccggatcttggttggattcagaaaagtagttattaaaaatatctgataccacataactggataaatcgtctcttgctgcagtaaagtgttgtgcatgccccgtttcttagcaagcttgcggaggctttgtttgttgttcccttccagtgtggaggagagacggtcggacgctgcagctctgtgttgtgtccttatcaggcatcatgctaaaaaaacatttcctccagggggctgtttgtgaaaggcaagattttcagaggttttaaatgggaggatttcagccctcctggaccaagcctctgcttggagctaacatcgaagctttcagagagttttcctatagctagggtggcctctgtggccatgcctgaccttcgtctaggtgttggcattgctaggaccccaaaatcctaggggatgtgacacccaggaattctagagatctcccaggcaccccgggaggatgtggactccaggcatcctagggggtgtggatgttcgtgatgctgtctttgtggatggggaaaccctgtaacaacttagctcctgctggggccagggagctggggctggggagctgaggccgaggagctggaggccagggagctgggggccggggagctgggggccggggagctggggccggggagctgaggccgaggagctggaggctggggagctgaggctgaggagctggaggccagggagctgggagctggggagctggggccggggagctgggagccagggagctggggccggggagctgaggccgaggagctggaggccrgggagctgggggctggggagctggaggccggggagctggggccggggagctgggggccggggagctgggggccagggagctggaggccggagagctgggggcyggggagctgaggccggggagctggaagccggagagctgggggccggagagctgggggccggggagctggaggcccgggagctgaggccaaggagctgggggccggggagctgaggctggggagctggaggccgaggactgcaggccctggcttgtgtttctggcacaggactcccgagtgactggtgttgttggggtggatataaccaaacagggatttaaggaatgcagccagcaattgcccaaagccacgtcccctggggagcccccrtcctcacgggtcctggtgtcttcatcctgtggactggctcagcctggcctcagcgcctgccccggggtcagcaggttaaggggtccacagcccctgcagcaggaggttttaatgcctgaactggagaaccttcaaaggcacacacagaatctctgtmtcctcagcatcctcccatcaaagtctgtccgcatgtgttcctggctagtggctcaggaaaggtctgacgtcttcccacgtgtgacacagcagcacaaacctccagcacgtgtccccaccctgcacacaggtgttctggtgacgtccagtgaaagggtcacttataagccttggggccacagtgtgtcctgattaagcgatgtttgtaaagttgatctctcctattgtcacggcgataccttttattatagaaagtccagaggctgcaaatcaccaggaaaagactgcgcatgctgggattcccccaccacaacgtcttcgtgtcatttttgtgtctgtcctaatggacttccttttctttggtaaggacatgagtaattataaaaatggaattgtagtgtttcttgtgacttttaccctrcattttaaacctcattaccttaattaggtgactttttgtgctagctaaaggcataaagcaaatattcatttccccctttccagccatcatggttttttccaaagtgcatcatcccagcatcagaatttcagaactctgggggaatcaagattcagcctcgtggggttttgggagttttcagagtgggggtgcaggacccctccccgagtgggtcttggtgtgcgatcctcagaccccaggcactcgcagtcccggctgccgcactgcctgcctgctgcccaccttagcccacttccagtccgacaggcagcgtgaacagaagtgacctctctgtggtgattgacgtgccaccagagtggcccttggagtaacaaaggccacacccaggggtttgggcctaaatgtgcttgctccgggcacgattctcaaacctggagcccatgaggattacctgggagctgttgcagaacgagggcagctgggcctgtgcccgggcctgtccagggttgctggggtggggcctgcatgtcagggtggaatccttgccactcctgcctgcagcctggtggagacatgctcttcaggtcagctctggttatttacgttttcacatyagtacggcagggcctgcatgggtgcgtttgtgtctttcacttggcttcctgctggtgaggggtctgctggcagaggtgctcacatgtgctcccctggcctgatggggcaggtttctctctggccacgtgcccacgtgcattctgtctgctcaacctcccaagtgcacagcttgaaggtggtccagaccttaatgtggggggattttcaccaaaaccctgtggtgtctccaaacagagcgagaatgaaccccctgggaagcatrtgaagaagccgtgggaggcaaacggagctgtgtttggttgtaagggatggggctgctcatgggttttcagtgccagctctgggaagggtccctttgctgtggagaatcacagaggaggcttttcttttctgacctgctgcccctgcaccccatgattctccctcatcagagttttgctttctgctgggcaaagccaggaagggacagacagtccctggcctgggttgagcccccaccaccctgtccctccaccgtgggaccagagctgtccatgacaccaccctgcctggccatggcccttggatccctctagggcgggcgcagggtccggagagcaggcacgacagctgcagacacccagaccttcccttccctgcaggaacatcgcagggcttgcccaaggccgcatggacagctgcattggaaggagactcatcgatgactctgcattttggggctttaatttatctgccaaatatggagtaagcccctggcacgtgggatattggagtctcagcagtgtgcacagcagagtcttgtctccatggagttggagggcrctgactcccaccaacgtaaattcagtgcagatgcaaaattagcagagaagagggcgtggggtgcactggccaacagcatgagccagccccacctccgagagtcaaggtgaagctctgaggcaggtgctcatttgcgagctggaatgcatgtgtgtacagaggttgtacccccagatttccaatttggggaggtgctggggcatgtgcctcctagtgccgtggacagctcaaaagtcagcacctgkataccctggtcctgtgtctggctggtccctgagtcccacaagatgtatgtggacttgttgtgagccactctcccaccgggctgtcctccggggttctcccttttcccaggtgtgtttggagggggtggctggatgtgctgactcctcatctcctctctttcacaccccgtgtcccgcctctccctgaccctgctgggcaccggtcagaccccctttcctcatctctctttcacaccccgtttcccacctctccctggctctgggcaccggccagaccccctttcccagatgggaacttgactggcggtctggatggagagaggcctgggaggtctgggcggcagtgtggacatctctatggattcaggcacccctgctctcgttttgtcttccctccactgggcacctgctggtttccaggctgccgtcagtcccctgagcccctctgtcttcccagcttctcccttaggaattaccagccattcgtccttttgttttcctttcagccccttcaaattttgtctcgggaataattttgtgcattatcagatcatcaagrtattttactaaagacatttcttcctaagaatttagttattaaactarcatttccctttttgagttcctcttatggtaacagctcttcactagaatgcctgggacccagtgtgtcatggcaaccatggggctgtcccatggcagccccactcctgcactaggccagggtctctctgcctccacgctgctcccttggggtccatcgtgtcttggcacccgtggggccgtcccgtggcagcttcgcttctgtgctgggccaggtctctctgcctccatgctgctcccttggggtccagcggctcctgggtggcagcaacacagagaaggagcttccggtctattttctccctggtggaggtctctgaagatttttcactgctggaaaaagaggaagaagcccagtaaaaataacaaacgaggggatggagcctccatacacacagccttccttgctcacgggatgagcctgggtctgaggggcttggagcccgccttccaggtgaactgtcagagggtcaggaacccggagagcccctggcacygcaggcatcactgctgcctccgtcatcaggccccacgtccctcttgtgcttgctggtggcggtgccgctttctcttttagattctgcatctcgtgcgtgtcggttcctgggtgatgagcggccttggccacaggaggcggagcagggcccaccgcagtcggggaagctctgggtttgctgtctgctcggctttcctcgtgaggttctttacaggatgttctttacaggatctgggggaatgcggggggtgggacgggggctgctggttggtgtttgaggagctcacctgcaggcaggacgtgtcctgaggatccgtctcagctgcatggcaggcatggagcagggctgcctccgtttgtgtagaggatgcctgcactccagagaggctctgaggttggcctgagaggctctgtctgcatttgtggctgggaccacggtgtcctgtgctgaggctggtctcagttgctggggagatgctgccttgggacctgcaagagggcaactcccagcgcccctcactttcaccccaaggagaatcgtagctgagatgacaaagcgcatcttgtgttcttgttagatgtgtgttggcttcataatgatgcagcataatgatgtcaggatggctttggagctcagagaaatgggcttgagccaccataaagcaatcccgttggacttaatggctgtgattttgttgtggtgatgtcaggaggctttctgtccagtttctgaggagctgtgtgtctggtagacacagagcaataaagcaaaacaaaaacaaagccagaatgctgctccagcctgagtgtgggggagatgggacagcatgggttctgtgcatgacgactgccctgtccacatagggtagcgcatctgcttggttcaaaagtgactaagacattggtcttcaaaaaatatccatcagttacgtcatttcttttggcaaaattcttgatgtttgtgggggcctcgtaagtttaggcatcctcattaaaacctctaaagactgtcagaaagcacagctttaacgatgacataaaggcatctgttacatgagaaaagcgtttacttcctctcctcaccccagtatgaaaggtggcctgagtaccctgcaggtgtggtcacagcagatctcttgcatgcagggagtttggcaaacccagactggtgctggtctgcagactcgccgcccctcccagcttcgctccctgtgggactgcaagtgcctggggactaatgagtcccgcttcccactccccttgctgggagagctccaactgacggccaaggagtgagcgtttaaatacctcagctacaccaccccttgaatgggatggttccggtgcagtaggagctggctggtgatgcacctttcactggaaacccaaccttccttgtcacactttttttcttttaaaaatttcctcctctcccctccccttccattcccttgtttcttttccttcttttcttttctttcttttcttgagacaggatcttgctttatcacccaggctgcagtgcagtggcttgatcatagctcactgcagccttgacctcctgggctgaagtaatcctcctgcctcagcctcctaagtagctgagaccacaggcaggagctaccatgcctggctaatttttaaaaatgattttatagagacagrgatctcactttgtggcccaggctgttctcaaactcttggactcaagtgattctcctgccttggcctcccaaaacactgagatcacaggtgtgcactaccacacctggccaactacaattgtttcttattccaggtctgcttctgtgggaatagaaatagagaaaatttttcccagtgaaactgctcagcagggtctcctatactgacacccactttcaacaattcaccaggtgacacaattctaaatcagctctttgtgccccttattaaatatgagcaggcatcccaggatcactggacacttatggaaagcctctaatgaaagagccctgacagccacatggaagaagacagcatgaaatgaagagagactatggacactaagcaaatacataagacatgtataactccaggaaaaacaagaagacactgtgaaaggaagagacactgtggacactaagcaaatacataagacatttataactccagggaaaacaaaaagaaaaaaaattaatactagtcacagcgtactacatagcctagttggggatagcatttacaaagtcacaatattgtaagcacataatactgatctgatgaaaattgtaatgtaactaaactgggaaagagaaagtaagcttggaaacagtgatgtgttatggagaggtaggcccatcttctgtagcagtcagaaaatagatacatcctaaatctgaaagctgagaaatggcaacgtgaatgtgtcatgtggagatatggagatgaaaaccaagagtcagctaaatgagttgagggtgcttacctctggggagtagaaatgcgggtggggaaaaggtgggttagaggtttgctcatttccccaaccagacttagatttttcaaactatgtgcaagcatgatgtttaaaaataaaccctaaaataagaagagagagttaactttgacaacggcaataacagaacaaagaatgtactttatgtatgttttctttgttctttgtttaccccattctagcaatgcagaaacagttagaagacactcaccgagccccacctggcttcccacctgtgaccaggtgaggcaacagtgtgggggaggatgaggcagctgccctcggcattgcctgtggcaaggccagcaacacaacccaggaaaggggaccgttttcagtgtctagtgggataataatatctagcatttactgggcatactcaatcttgctaccaccctggttttgaaaacacaaatctgttcaaatgcagttgatacatgggggagcactttgtgcatgatgtaattttgcattctcctatgaatgatgaatgacgggttgctagtctggttgaacagttacagatggatttgtaagctagacagtgtccctcaggaccatggaatgtgtggatgtatcagcactacagaatcttcgagtctgcaaattttcccagcctcaggatcagtggggactcatcatcctctcatttccctgctttggttccaccctcagtggccgtccctccggttcctactccttgttatcatgcacacctcgatttacgttcatggcattggaaaaccctcctgtttgattgttactgtmargccgtggcaccctgcttgtgcttttcaatttgttttgttttgctttgcacagttgtgtgtgcatgtagctgtttttattcactgttatacttttattctgtatttgtttcctgtttcttttggtcaagaggcctcacaaggcatcttctctgcaggggaggagactcagccctgagagggatgttgttgtcatgtggaagtggaggcacagagtgactggggggtggggagggagtggcaggacaggcccagacctgcccaaatggtatgacatttcggcccccagctttcctgggtggagccctgtgctgtccctattttgagctggggcaggacacactatttctctggaagggaaggtgagggtgcagggcacaggaggagtgtttgtttgggcctccagagctggtctcgatctgaggacctgcttcatgtcagccctgtcccctggccacttggagggcaaccctgaggctggttcacaactgctcgggggtcctgccgctgggagggctggttcacaaccgctgagggtgtctggatgcaggctcctggcagcatcctggatgggcgcagctcatgtggttctctgcagagtggccccacattgggcacaagcccctgtccctacctcggagggcatctcctgcattacccaggaagtgagcctctctgaatcttgtttgctttgagattacgcaaggaaggaaaaaatgctgaagtgtaagttttgagggtgtgaggcatagtttaaatcagggaggcactcttacagcagatggcctttcagaataattaaaagagcaaattaaaagagcaaattgaaagagcacttcagcggggcctgggtctccacagaggacaggatgtcggtttgtttcaaaagacagaaaataaagtttctttccaaagctgcaatttccttgaggccattgtaccatcatgtcacaagctcgtgtactttttccttgtcttggggcttttacagtgttctctgggggctatttctgggctctcaacagtcttattttgggaaccactgctgagctgcttggcattctctacagctgttgtggcaaaacaggacagaccccgaggcgggtcaccgctggtgtgtgcaggtggaggcggcttggggagatggtatgcacacacacacacatgcacacatgtgcacacacaaacatgcacacacacgtgcacacaaagcacacacaagcctaccctgtgagaacggagctgccccagttccctgagtgcccccttcagagctctgggtggcctctaacatcctggctgcttgtccatccccctgagcacaggaagcgggcaaggcacaaaactcactcggcgaggaggggagcagctcgctccctccacatgtgcatgcatgtgaacaaaatcacatgcatgtacacgcgtgcacacacgtgacacattcatgcacacacacgtgcacatgtacacacacacacagacttcacctcacgatgctgtcacctttttgtgtgtctctttaaaggtctttttgttttgattccttttgcgggtttgaaatagagatatatgcattaatcatttccccagcactacacttttattgttttaaacggcttctttgtgtgtgtgtgtgaaaatgctcaaaaggcctttgacaatgacggtgagaaaaccagccctggctgggcgctgtctcccgttagggagtgcctcctcagcccacgtggcactggctgcccgctgccctgtgcgtgtyycggccttcgctgcctctgcagcctgggagcttggtctctggttggggaggccagggccagcctgcgatgtggctgttgagaagctgtgcgtgcctgggccagggcagcagctctgccccatgggtcgcggcgggactgggatgaggccccactctcacctctgtgaccagggggcagagggaagtctgtagcccgacctcacctgctgcaggctccgagctccccctccaggctgggccctccatggnnnnnnnnnnnnnnnnnnnnnnnnnnnnnnnnnnnnnnnnnnnnnnnnnnnnnnnnnnnnnnnnnnnnnnnnnnnnnnnnnnnnnnnnnnnnnnnnnnnnnnnnnnnnnnnnnnnnnnnnnnnnnnnnnnnnnnnnnnnnnnnnnnnnnnnnnnnnnnnnnnnnnnnnnnnnnnnnnnnnnnnnnnnnnnnnnnnnnnnnnnnnnnnnnnnnnnnnnnnnnnnnnnnnnnnnnnnnnnnnnnnnnnnnnnnnnnnnnnnnnnnnnnnnnnnnnnnnnnnnnnnnnnnnnnnnnnnnnnnnnnnnnnnnnnnnnnnnnnnnnnnnnnnnnnnnnnnnnnnnnnnnnnnnnnnnnnnnnnnnnnnnnnnnnnnnnnnnnnnnnnnnnnnnnnnnnnnnnnnnnnnnnnnnnnnnnnnnnnnnnnnnnnnnnnnnnnnnnnnnnnnnnnnnnnnnnnnnnnnnnnnnnnnnnnnnnnnnnnnnnnnnnnnnnnnnnnnnnnnnnnnnnnnnnnnnnnnnnnnnnnnnnnnnnnnnnnnnnnnnnnnnnnnnnnnnnnnnnnnnnnnnnnnnnnnnnnnnnnnnnnnnnnnnnnnnnnnnnnnnnnnnnnnnnnnnnnnnnnnnnnnnnnnnnnnnnnnnnnnnnnnnnnnnnnnnnnnnnnnnnnnnnnnnnnnnnnnnnnnnnnnnnnnnnnnnnnnnnnnnnnnnnnnnnnnnnnnnnnnnnnnnnnnnnnnnnnnnnnnnnnnnnnnnnnnnnnnnnnnnnnnnnnnnnnnnnnnnnnnnnnnnnnnnnnnnnnnnnnnnnnnnnnnnnnnnnnnnnnnnnnnnnnnnnnnnnnnnnnnnnnnnnnnnnnnnnnnnnnnnnnnnnnnnnnnnnnnnnnnnnnnnnnnnnnnnnnnnnnnnnnnnnnnnnnnnnnnnnnnnnnnnnnnnnnnnnnnnnnnnnnnnnnnnnnnnnnnnnnnnnnnnnnnnnnnnnnnnnnnnnnnnnnnnnnnnnnnnnnnnnnnnnnnnnnnnnnnnnnnnnnnnnnnnnnnnnnnnnnnnnnnnnnnnnnnnnnnnnnnnnnnnnnnnnnnnnnnnnnnnnnnnnnnnnnnnnnnnnnnnnnnnnnnnnnnnnnnnnnnnnnnnnnnnnnnnnnnnnnnnnnnnnnnnnnnnnnnnnnnnnnnnnnnnnnnnnnnnnnnnnnnnnnnnnnnnnnnnnnnnnnnnnnnnnnnnnnnnnnnnnnnnnnnnnnnnnnnnnnnnnnnnnnnnnnnnnnnnnnnnnnnnnnnnnnnnnnnnnnnnnnnnnnnnnnnnnnnnnnnnnnnnnnnnnnnnnnnnnnnnnnnnnnnnnnnnnnnnnnnnnnnnnnnnnnnnnnnnnnnnnnnnnnnnnnnnnnnnnnnnnnnnnnnnnnnnnnnnnnnnnnnnnnnnnnnnnnnnnnnnnnnnnnnnnnnnnnnnnnnnnnnnnnnnnnnnnnnnnnnnnnnnnnnnnnnnnnnnnnnnnnnnnnnnnnnnnnnnnnnnnnnnnnnnnnnnnnnnnnnnnnnnnnnnnnnnnnnnnnnnnnnnnnnnnnnnnnnnnnnnnnnnnnnnnnnnnnnnnnnnnnnnnnnnnnnnnnnnnnnnnnnnnnnnnnnnnnnnnnnnnnnnnnnnnnnnnnnnnnnnnnnnnnnnnnnnnnnnnnnnnnnnnnnnnnnnnnnnnnnnnnnnnnnnnnnnnnnnnnnnnnnnnnnnnnnnnnnnnnnnnnnnnnnnnnnnnnnnnnnnnnnnnnnnnnnnnnnnnnnnnnnnnnnnnnnnnnnnnnnnnnnnnnnnnnnnnnnnnnnnnnnnnnnnnnnnnnnnnnnnnnnnnnnnnnnnnnnnnnnnnnnnnnnnnnnnnnnnnnnnnnnnnnnnnnnnnnnnnnnnnnnnnnnnnnnnnnnnnnnnnnnnnnnnnncacccctcacccctcacttgtgcagggacagccctgggcgcaggtgcccgcacgggggattcaggtcgagaccgcgcctgcgtgccatctagcggccgtgctcgggtactgcagcccctccaccccagactccggaggctcctggaaggtgggtgaaccttgcagaccacccaggcgaaaacgcggctacttactcaggctggcgggaacgaggggtcagtcactgtccctcgtgcttggcaaagactcaggcaggtagaggagccgaagttttacagcagaaagggctggctggcccaggtgtcgtgtggacgggcagggcctcctgagtgctggctggggtgcccccggctttctctggctgacgcgttgcagagatgcggcctgcacagcctggccgctgtcccactgtccctgtgacgattcrgtctcttttgggcacacggtaaatgcctctggtcagggctgtttaggaggtgagggtgtcgggtctccaacactgagtcaggtggaggggcagcccctgccgcacaccctctgtgtttttgtgagttgcctacagtccttgtcgccccgtcctgaacgctggaagctttgacgctagctcgtcttcctttcttaggcccccagcagcaaaaatctgctcccctcatcaatgagtgagttttgtgccttgacactttctgcgcctggggggatggacgagcagccagtacttagagaccacccggagctctgaagggggtgctcagggaaccagggctgctccattctcaccaggtgggcttggacagccacgggggctcatccccgacctgccaacctgggtcactcctggtgaggcagcagcatcccygtcgcaggctgggacagcagttccacaggtgttccctgcacacacctgtgcctctcacacttccgtggcctccaatgccctccctgtggccctgaaagcagccatggatttttgtgccaagaaaaattatacctgctccttggtgggggagccagaggggagccaggcgtctatgggggacagagtggggccagtggtccacagggaacagagaggtccaggcatctgtgggggacataggggaaccacgcatccgtgggggacagagggggtccaggtgtccgtcggggacagaggggttgaggtgtccgtgggggacagagggggtccaggtgtctgtgggagagaagggtccaggcatctgtggggtacagaggggggccacgcatctgtgagggacagagggggagcgaggtgtccatgggggtgggacattgttacccaggatgccagtggatgggctgatggcacagtttaaggggtgagagatgaagggtgggggtcccagagcagtggtgtccttggggtttgggtttgattgtgtgttaggggacgtggccttggctggggagggaggtgatggaaggtgatatacattgaacccaggctgctcaccacgtttgagaagcccctgagtgatgttccatcatgaagacggtgtgggcttccttgaagtgtgttgcaatcacgtcatgattccttcttcaccagtgttaggcgatgagattataatgaaaagcattagagccatcacactattgggaagcatcccccactaagctgtgaaaagctagaaactctgatgaaaatgacgctgaaagatgacttccacttccaaaaggtgcagattcaccaaagggagaaacccagagctgaggccggtctgcagcaggtgccgggcctgagacctttatgttgtctgagggaaacacctccatcccctgtcaggctcagagtgtcctyttttgttctgggaaccatttctgtgtcatttrtgtggaggctgaagttgcccggggtcgtcctgcaaggcgtctcccagagcgaagtccctccgacgtgccccctggtgatgatgtttaaggaaaccaggctgaactttaattttccttcagtgttcgtggcagagcgtgttaagtacacttgacctttctaaatttatcacgcagcatttgagtctcttggatgtttgcaggattttcaaacccaggtttcggcctttttaaagacgccgtggggtgaggagggtgcgttggaggcgctgtgaccaggatgggatggtttccagctcccgttttcttcctgcccagtctcctttccagccaacatcgagtaagaccagggccacctggggtgcagaggcccctggaaaggactccccttccttctctgcagcaggcacaggggcctgggcagctgggcctgtgcagccctttctctctgtggacttgctgttttcagcctccctggaggggctggtggttctagacactgaggttgacaggcgtgctcgaggagttctcatcaccctgttcttccttaatggaaggaagttatttctaaaattctaccgasaggggctgcctggggtgagacatacctgcaggtccgatgaggctttgggatgtggacagataaccagagcaggatggtcctgtccgcaggggataccgggaagcctgtggggtcctggcgaggctccggcttggcttccaaggaccctgccccttggctgctgactggacccagggcccggctttgtgtcttcgcagttggtgaaacacattgatctacaatgtgtttctgtagcaccttgatgtggtcagaccccggtgagttgactcctcccccayggacacaaggacagggctgcacccacatgttctgccatcctcactggctgctggggccgtgcccccacgtggagctcttgctggccaagagaagcggctgtcctgtgaggccctgctccatgccaggatggttccccagacaacgctgggtgtgcagcagatccccgccgccctctcctcgtgtgagctgacgcatggacagaacacttggggttrccctgtgcctgccgctcagccacggtctcatgagtggacccatcttgtggaacatccacagtgcccaggaggcttgcctttgtgtccacaccctgtgtccagtgctggggtggtccctgacccagcccctctcctcctcggggagtttgacctgcatggccacatcagagtcctcaccctgaggatggacaggagatgaagggagggagaggggaggtccaccctcattccctccccacggaagccccagcctggccattgtcccttggccaaaggtcacccccaaaggcagcccagtcctcacaattccctcccctgggtatggctactccccccgcaccagcccagtactgcatcatccctgccctgcaaacggtccctcctgaagccaccctgggggcctggtggaggactctcgrctcacaggcgggctccctgtctcaaaggtgctcattcctgagggcgtcatcccaggtggcaaatctgtttgcttttaaattctggtgagagcagtgctgctcactgttgtgccctgtttgtggccttgtctggctgggggtgcagctcctttcctcccccgcccccggtactgaccagggcctggcactggggaaacctcctgcctcctcccatccccagggctgcagggctgcatccagcctgggcagctggtcagggctgtgaggggctggggtgggactccagctgctctatgtcctggcaggggttgggcctgcatctcaaggggcatgtgcagcatgggtgctggtgggaaaatgtgggaaggcctctcctcctgcggggtaggtgggcatttctcatcataaaatgagacatttgtatcctcctcatggtgaccttaagcctcaggaagaagctaggggaggctgctgtggctgagasaccttcccaggacatggtctctttcccgmcgggcctctgcagtcagcgtccgaaggagagatgggcctgtgagtatagctgggtgtcagggcccggacctggatttcgggcctggtgcagcttggccaggagagggagcgcggtttcagacaagggagggtggcgcctgggcttccaggcttggagggatggcgtgggctcacagcccctttctcctcggccattggccccagagggtccctccagggaatggaagtcaatgtctctcgtgcaggttctttttatctttaagggagcagcagctgctgggtyagggtgtttggaataasaagtatttgttcctgcagctgtacatctgaacgtgaaacatggctgttgcgttacaaccgtcgcaagagggaagaaaatctagtctgtagttaggatgatttccacccctcgaatttggaagtggtgaattagtggaggtgggggtgggtttcacaccatttcaggagggcttgttcctgtagggccctgacagcggacagagcctgccacgtggacacagtgcatgtgacgcggcacccgtgggggatgggttttcatctgcccttcctgcccctccatttttcggagcctctttggggcatgacatacccaccttgagcttcgcattttgagaggacatttgtagagtggagctgacagttaaggggacgatgcgcgagaagagaaggcttgggagacatcggccagctctcccgcaaagtgcgctgagagctgaggggctggtggttctgcaccctctgggacggggcaagcctggccgggcagtggacagcagttggcatrggacaggctcagctcccagagccacagtgagcagcattgcggccactcggtgtccagatgcctgygttccctcctaccttggccgaggccctccagcacgatggtcctactgcgaggctggagaagggatggggtcggggtgcctgctgtgactgtcctggggcagaagggcctccagctcagagactccgcaggtctcacctcataactccgtctggctgctgattccactttacgtgttctttgaaggcaaatgtgtttcccatgaagcaaattggttyggctgcgacttagtgccactcgctgcatgggaataacttcttagtcgagttcattgctgttccaggtgccggctgcccctggctgcaaggagaggccatttccacatagcagccactgagctgtgtgaccatgagagccgtgggaggacacggcccagggcgacggcgcctctgagttcaaggggacatgcctctgtgcacactcagcagccgggggatgagaggacagggtggtggggyggggatggagctggggcacaaagaagatcggtttgaataaacgcagctgagtatcgtgtagacgtttgagaggcttcatccctccgtaggatcctcctgtcttctgtggatgtgaacagcgtcattacagagtcatccgaggtggatgcaggaggcctggctgcaccggaggacagcacctggggctgcctcaccacgcgtcttgggccagggccctgctttctggatgtgtccattaacatcccacaacctttgctgaggctctcacctcttttctccaagagcccgtttgtgaaaactaagatgtggccaggaacaaaggagagcaggaaggacagaacttgcgtttagcccrttttctattctgggaatgcgacgcgtgatgatttatccgtgcatctgtgttgtcatccgtgttctygcagggcctggttccagcagccaggctggtggctgagtctagaattgcatttgtgacggcggcagccgttattgcaaatgtacctttcttgtgtattgatctttcgcagatcccattatttttaatttatttaataaggaggagtgtttgtttcataactcagaatcaaaaccataattattcactcagactctggtgtctgtgcaagggaagcctgtgggttgatgtttttcattcttcaatgaccagaggattaatwgaggggccaccacagaaagaaggcacaatacatctcttttctaatgaacttgcatttcagagcttaaatccaaagtaattggatttcacagtcaaagtgygctttcacttcgtgtggtctatggacacggctgcgtgtcctccacatgcgtcgcagcctgggctgatcttaaaaacaactttatgtacagcaggtgtgtcgtgtttcattctgtgaggaatcactcactgaagtgtggtgtggcctcagtggccgcacctgcctcctgccgagggcttcrgggcccaggtgtggcccttcggrcgcctgtttcccttcagcttctcttcgcagactttgaggcccaggcactgccctgcctgcatctggagcccttctccttccaggggcccgcctcacgttgggtgaaatcaagcctccatggttgtaggttctaatcgccagtccgagcttagcccttagggttgacctattccttcagatcgatcacagctgagctcagcactgagcattggagggtgaaaaagaagttttgtatcatctgtgtgtgggttaataataacgtatgtatttggagtttgtgtctggttcctggctcctgagacccttggagtctctggggcgatgagtgtcttttgtgtgctgagaggtggctgggagccctggctggcttcagggtggggctggtggccagaaaggccaaggcaccattagatggttgggcctttcaggcccccccaactcttggggggttaatcaccaatggccagtgatttaatycatcatgcctatgtacgtgaaacctgcatagagaactaagtgagaggttcatggagctcgcaggttggcagacacgtggaggtgcagggagcctggtgcacccagggcaggtgtgacgtgtgccctgcaccctgccccgtgcgtccctcagtttggctctccttgagctgtgtcctttataagagctagtgatggtgagtgaagtgctttcccaagttctgtgtcatccaaagaaaaatygcacccgaggaggttgtgggcagccgagtttgtcgctggctgggaagaaatgcaggtggcctggctgtccatctgcactggccctcatgggggggtggtcttgcgggaccgagcccagaagctgtgaattctgggaccttggtgccgggattgacgtgaaccgtggcttcccgtggaggatgtggccgtggatcaggtgatggccactcggaagggtccaggggcttcttgttcagtgtggacaggggtgctccttgccgagacctgcagagtgaagccgacacaggggagaggtggctacatcctggggtcrggggaatcctccgaaagtattttctgtggggagaaggctgctgtggagytggggttctccagagaaacagactcagcagggggtttgtatgtgtgtataaatagagatgtgtgtgtataaatagatatatgtgtgtgtaaatagagatatatgtgtgtgtacagacagagacagtatttcaaggcattagctcaccgattgggggcctggcgggtctgacatctgcagggcagctggtgggctgggaattcagaggcgggttcctgctgcagcctcttgtccgaatcccacagggcagcggcttggagactttgacagctcttcatgttgccgccatctacagcaggattccatctccttcaggaaacttmgccctggctctgcagcctccgcctggatgagaccatccagcaccattgcctttaagtcagcagattcagcagatggtggtggccaccgcgtcttcccagggcctcacagcagctctccgccttcagctgcatccccgggcctggccgggccaagctgagctgacagggatgccgcagccccctggagtccagtccccccaggacccagagagtgcttcagctgacagggatrccacagccccctggagtccagtccccccaggacccagagagtgcttcagctgacagggatgccgcagccccctggagtccagtccccccaggacccagagagtgcttcagctgacagggatgccacagccccctggagtccagtccccccaggacccagagagtgcttcagctgacagggatgccacagccccctggagtccagtccccccaggacccagagagtgcttcagctgacagggatgccacagccccctggagtccagtccccccaggacccagagagtgctttccaacatcgtaacccgatcgcactccacttgtaaatgcgcccttggctaccgtcttacaaaacaagagttgtctttgtggtcaccatctgccttccagctctctggagcctgcggagaccccagcgaaggcagtgagcgtggtcctggccccacctcagccctcctgtggtgcaggatgagccctccctgacctatttggcttgcagatgtgatttcagtgtctatgtgaattgggcatctgtgtttacagttctgaaagtttcatggaaaggtttctggtctcccatgtggtaccaggagatctgtccgtgtgggccctgaagccagggcagctgctggttgaagctgaggccacttagggcaggactttcccagcctcctggggatctgggtcccggtttggcctcagaggcatttgggcagagcctcccgtgttctagaacacatgctgccacagagacgcgtcatcaaaagagcctgggcagacgcgatcccagagggtgagaagccacagtccccccatcctcagcccacccctgtggcgagtgcttaggtgggtgatcgggccgtgtggagtcgtgttcatcatggaggatgtggaagcaccttcccattcatctcccagggtggcagrttgctaacaccttcccattcatctcctagggtagcagatttgctaaaacyctggagagctgcattaacacttgaaaccaccacagcaagagctgggagtcgatgcagtaggagcctgtgaagggctgggctttctgttttttgttgcctgaacttgatcgctggtaggttgtacatctacatttggtgatggtggataagattggggattgaaggatccatttttttccaggttaaatgtttgggcatttggatgatcgacagtgtgttcagttatgctttctccaggttcatgtccccactggccccatctcctgcacccatccatagctataagctcccctgaccccatcaagctacctggaaaagtgcataccctggtcccgaggggaattggatgaatgagcctggatgaacggacgcagctcctgcaccatgggaggagggactcggggcatgggaggagggactctgggcatgggaggagggacttggggcacgggaggagggacttggggcacgggaggagggaggaggggtacagaaggagggactcggcacgggaggagggactcggggcacgggaggagggacttggggcacgggaggagggactcagggcatgggaggagggaggaggggcacagaaatagggactcagagcacaggaggagggactcggggcacgggaggagggacttggggcacaggaggagggactcagggcatgggaggagggacttggggcatgggaggagggactctgggcatgggaggagggacttggggcacgggaggagggaggaagggtacagaaggagggactcggcacgggaggagggactcggggcacgggaggagggacttggggcacgggaggagggactcagggcatgggaggagggaggaggggcacagaaatagggactcagagcacaggaggagggactcggggaatgggaggagggaggaggagcacggaaggagggactcggggcatgggaggaggggcacatctgctcatggagggaaacacagcagagccctcttcctggagatgaaatccatggtgttcaccacaggagagacgcacaaggtcaccaacccatcttcttcctggagactgtggaaatttagaaacggacttgaaaccgttttctggtatcacgtagctcatcagtagcaggcctgaacttgtgcttttctgtatgccagcatttgtaaactttgagtaatatctaaaccccattaaaagggaaaaattgtatggacctcctttgttgacttaaggcattattatcattaatgtaattgtttaaatcactgaaatgaaacaaggtgtggaattttatgctggattttaattaacaagaatgtttcatggatgcccaaacttctgattttccattttatctcaaaacagctctctttgcttgctatacagtgagattttaaagtagaggccaattctacttggttgttgcactttcacccttaatgtttcttcaaatcctttcaaaatctgaaatgtcatcagagtacatcttcatcggttcaattgaaaccttttttttccagtggtgtctttcttgccttaattggttgggactcttgtctctggaattgttcccagaattttatattaaagtagcttttgttacagtgggactcacatagtgtggtatgattggtttacaaagaagacatttaggttcttgtcgatgttatcagaagaggacaaatggtttcgtatttattattccatgcttcaggggcattggtgggagtgtggaacggaaaatttaaacatcagaaactccattaggggacgttgatgcactgaatggaagtcacaccagcaaattcttctgctgtgagggcggaagtcacaccagcaaatcctgctgtgggggcgggcaggtgattttactgatgcgcagcaaatactgctgtgagggcgggcaggtgattttactgatgcgcatagcccacatgctgcagaggtgcaccctgacatctgtgtttggtcggccctctgactcgtgaaaatgtcttctggcaattagtatttcagttttggtacctttggtaacttttacaaagagtgcatgtttaagggtcaaatgtaatcacttattagtaaatgaaattttttattttaaacacacagatgggtgttatgcacacagtttgcagtgatttttgatgaagggaaggttcattccctcccacaaacacccttctggcttaatccctcctgtaatacagggtttctctacattatactcatctgtcttggcttaagcagtaacacctgtgcctgttgaagcgccttcttcctaagtgtctggctttgtgtactttcatttgcatacagagatctgtaactgttaaggagcccctgccctctcacactgtggatactgtcagtgcctacctttcactgagatcagcgggaaaaacctctggaggttgggtgctgcccctggcatcttgcattaatagtttacagcccgcggtccccacatcccggctgcttctgccctgtgttgtgctcctgagagatgtgttggtgtctggccgaaaggtccttttggtttccagggtaccataaatcctcaaaattaatgggcaatgcaggcccttaccagctcctcctcctgtgtggtgacctccaaatgtggccacctgggtgacagcagacaaatagacatgtgtgccaagtaccttgagcgagcccagcaggttgtgatacagttggtgcacgcaaatcatgagtgtgtgagggacatggatgaccagcgatgagacagaggatgcgcgggatgcttcaagcagagtttaaagttctgtccctgaaaatggtcaaggttctcaacaggaagtaaccatccaaacagtggcattttcaagccaaggactcaagtgaaaaggattccttcagtgtgatcacrctttccggagcatagtggctctcatatgccaaagggtttaaaatactaatgacgttattacgtaattctgtaaaaaagtcattaacatcacaaactggccgtagttgtttgctgctactgtgtgcctctytgagacatatgtgtgcgtgaagacacctgagcaggtgggctctwgttggggttwccataaactctcacmctgagactcttctgcaattgaacacaaacccacacctttctttcctgaccacttaaagttcttttgtccttctgttttgatgactttagttttatcttgacttttgaacttcaaattaaatttctgacagtaaagctggataattttaaaatatcattttttgggatcccggaggctatttaaagtctttggttccatgtaattaataaaaaattgaaagggcattccatggcaaaactctgcactttaaactggcagccacaaagggtgagggcaatctctcctttggaagagtatattatactttrgaatgttaagtccatgctatttcccattttgtttatagggatgatattatgtgcatgattgctcygttctgaagcaaatactggccctgtggattatatcaaatagatacattcactaatagaagtgcctgaccctgcatgctgcttttgcctctgatcactttttttgaatgagttacaaaaataattcttcaaaatagttcttcaaattctgttgaataagagttctgcatgaggtgtgtcttttgaactcttgttggacgttagctcaggaggtgggtcttcagggcccctcatgtgttaataggagccttaatgttctccaggcatcatgtcatgatgaacattaatgtactgtgggatactgacggagtgtgccrtttatcaataggctgtaagacagtggtccccaacctttttggcaccagggaccagcttcctggaagacagtttttccatggaccatggttgggggtgtggttttggaaagatccaagtgcaatatgtttattgtgcacttttttccaactcatttgccactctaaagcccactgatagggttttcatatgtgtctgcaagcaattgattgattgtgatctctgtgcagtcagacctctctgytcatgttaatctgtgtttgcagctgctccccagcactcccatcactgcctcagctccaccttggatcatgaggcattagattctcgtacagagtgtgcagcttctgtccctcctgtgygcagttcacaatggggtttgcactcctgtaaaatctaacaccacygctgatctgacaggcagcrgaactcaggcgggaatgctcgcacacctgctgctcacctcctgctgtgtggcctggttcttgtactggttcatggcccgggggttggggactcctgctgtaagaatagaatggggctggaaaaattgtttttgcagaagacagatttatgyatttctttccttcatggcgactttctgaggagagaagaggggagtggggaggagaacagtcgcattcatgggatactttgcaaattccatgctgttttacctgttttacaccaaaaagtgggtgaggttgtgtggcttacccaggacatggtggaggggtcttcagcccagggtggtgatgcagtggccccatcctcmctggtcctggcctcctccacatcctgacccccggggctgttcacggaggggagttggagtcrtgaggctgtgctgagctgcgttgcccaggtgcctgcacatgtatgcccaccagggtggacctgtagtgggtcctgcccaccatttctctcctggctgtggctctcagggtgctctggtgagacaatgtaactggcacctgccttagggctagtgatatggtttggctgtgtctgtacccaaatcccatcttaaattgtagctcccacaattcccatgtattgtgggagagacccagtgggaggcacttgaatcatgggagtgggtctttctcgtgctgttctcatggtagtgaataagtcttacaagatctgatggttctataagggggagtttctctgcacaaactctctcttacctgctgccatgtaagacatcccttggtctttcaccatgattgtgaggcctccccagccatgtggaactgtgagtcaattaaatcactttcctgtataaattacccagtctcgggtatgtctttatcaacagcatgaaaacagactaatatagtaaattggtaccggtagagtggggcactgctgtagataaccaaaaatgtggaagcaactttggacctgggtaacaggcaggggttggaacagtttgcagggctcagcagaagacaggaaaatgtgggaaagtttggcacttcctagaggcttgttgaatggctttgcctaaaatgctgacagcaatatggacaataaagtccaggctgaggtggtctcagatggaaatgaggaacttgttgggaaccagagcaaaagtgactcttgttatgttttagcaaatagactggcagcattttgcccctgtcctagacatttgtggaactttgaacttgagcaagatgatttagggtatgtggcggaagaaatttctaagcagcaaagcattcaaaaggtgacttgggtgcttggttttgtaggggaagcagagcataaaagttcagaaaatttgcagcctgacagtgtgatagaaaagaaaatcccaatttctgactagaaattcaagccagctgtggaaatttgcctaagtaacaaggagccaaatgtgaatccctgagacaatagggaaaatgkctccagggcatgtcagaggtcttcacagcagcccctcccatcacaggccctgaggcccaggaggaaaaagtggttttgtgggttgggcccagggtccccatgctgtgtgcagcctagggacttgatgccctgcgtcccagccgctccagctgtggctgaaatgagtcaatgtggagctcaggctgtggcttcagaggggggcaagccccaagccttggcagcttccacatagtgttgagcctgcaggtgcacagaagtcaagtactggggtttgggaacctctgcatagatttcagaagatgtatggaaatgcctggatgcccaggcagaagttggctccaggggtggggccctcatggagaacctctgctagggcagtgcagaagggaaatgtggagttggaacctgcacacagagtccctactggggcactgtctagtggagctgtgagaagagggccacagtcctccagaccccaaaatggtagatctaccaacaactggcactgtgtgcctggaaaagtctcagacactcaatgccagcccgtgaaggcagctgggarggaggctttactctgcaaagccacaggggcagagttgcccaagaccatgagaacccacctcttgcatcaccatgacccagatgtttgacatggagtcaaaggagatcattttggagctttaagatttgactgccctgctagatttcagacttrcgtggggcctgtagcctctttgttttggccaagttctcccatttggaatggctgtatttaacaaatacctatgcctccattatgtctaggaagcaagtaacttgtttttgattttacaggctcataggtggaagggacttgccttgtctcagatgagacattggactgtgggcttttgagttaatgctgaaatgagttaagactttggggggctgttgggaagatatgattggttttaaaatgtgaggacgtgagatttgggagaggccaggggcataatgatatggtttggctgtgtccccactgaaatctgatcttgaattgcagctcccataattcccatatgttgtgggagggacccgttggaaggtaatcgaatcataggggtgggtctttcccttgctgttctcctgatagtgactaaacctcacaagatctgatggttttataagggggagtttccccatacaagctctctttgcctgctgtcatccatgtgagatgtgactttgctcctctttgccttccaccatgattgtgaggcccccccagccatgtggaattgtgagtccattaaacctctttcctgcataaattacccagtctcaggtatgtctttattagcagcatgaaaaaggactaatacagctagggggtccccatccacctgaacccccatgaacctcttgtgggtctactgactttggccttcttggagtctttctgtttcatctgtgctgtttcttaggaaccccgccccacctgtgggctgtgctgtgagtttgaatgtggagtcttctccatctttgtctgtgctatttcttaggaaccctgctccacccgtgaggtgtgagtttgagttcggagttgtctttgtctttcgtctgtgccatttcttgggagccccccacctgtgggctgtgagtgtgagtttggctgcagtttctgaggatgcagcttttccttcctgtgtaattagtgtggctctttgtcccacccttccttccctcccctcctctgttcctgtctttgctttcatcaaacatttactgaacagacaccatctatgaaggtgggtcttggctgccactgctgcagaggcgtgttgcacagcagaaccgtattccctaccccggtcctcctgccaaccccagtcacccccaccctggggtccgcagccccttctgcaggctgctggagggagcatcctacgtgtggacacctgaccttgctgttcyctgctctagggggcagcctatgagccttccccactctgggggctctcccacccyttccatgcacacagggccaggcctggcaggtgcagcccctgtcctaacccagcacttctcaccccgcaccctgcctcaccctgcagggagctcttcccctccacagctctgagagacaggagtgcgtgcagatgcactgtcaataaatacttattaataacaaattcacagatgacaggactgggagcggggtcttctccccatcccattaaagtccccttgatcgtaacagccaaccagccttttctggtaagaattttgtcaagtattttatatataatatctcagctattactaataccagtgctgcatggaaggaattatcattatcttcaatgtattgattaaaacacctctttgacaaatgtgcctgcctgagcctataaccagaaagcaactgagttggatgttgaccctggaccctggaccctggaccctggagtgtgctggactccaaagcccaggagttttgcacactttctttggaaacgtggtgatatcaaggcagagaaccaagagtggggttttcagcataactggatgaagactgggcagcttgactcagggcattcgcaatagagggggcctgtggggagcagctcactgtggggagagracagggggctgaagtcatcctcggatgcaggcstgtggtcaccatgagtcactgggacctgcggttcccccttcagaaccattgctgtgtttctgtggaaaaggagcttaagtccctagtgggtccagggccctcctgcaccaagaaggaggtgcctggggaagcctctgggcagcaggckgggcttgcaggcccctttaggaaaactcatgccctggggagcgaatgtcaagagctgaggggacagcctccaaccattatgtaaaaaagccattgtcaaggtcaagggttgtcctgaggccaatagcttttatttgcttttgtgtcaggtttgttcaggtttgtataatcatatgatttgtatgcagtaaaatgcrgtttctaagtgcacagctggaggagtcaggaggaggtgtatagtcccggagccagggccaggacctgccgtgtcacacctggaaaacccacagctggcatcaggactggctgtgttacacccagaaaacccggagctagcgccaggactggctgtgtcacatctggaccacacagagctcttccttgccctcatggatctggttctgtgctgtgcttgctgtgtctgtgttgtagccacgggccctgtgctgtgtggactgtgggggaggcttctgcctgcaccctgcccttgagcaccctccgtgcagggccgtaccagcagcccgtcccttggtattaccaggtagtgtccctggaatgggtgtaagaaagtcagctctccagctgcggacatttggattgttccacttttcagctgtcgtgcgtaaagctgtgataaaccaccgatgccggtttcctgtgaactccattttcattcctcttgggtccatgacaaagtctgtgattgctgagtcccgggaaaattgtgtgtgcatttccacccccaagccgagccagccagttgcctgcctcctccctagcactctgcattgctggggtttcctccccagcctgtgggttcgtggtggtgtccaagtggggtccccttttcttatgcgtgatgatgctggctgtctcttcctgcacttactggccatcccttgctcttctttggtgaagaccgatacattttacatttaactatttttccataacacatggagattttattaacacacacgcacctaattgctaccagattcatgatgaaacaggagcatcccctgaccccgcgtgcttgatgtgtgacagggctgtgggggagtcccctgacccccctctcaggacgtgtgacagggctgtgggggagtcccctgacccccctctcaggacgtgtgacagggctgtgggggagtcccctgacccccctctcaggacgtgtgacagggctgtgggagagtcccctgaccccgcgtgcaggacgtgtgacagggctgtgggggagtcccctgaccccgcatgcaggacgtgtgacagggctgtgggggagtcccctgacccccctctcaggacgtgtgacagggctgtgggagagtcccctgaccccgcgtgcaggatgtgtgacagggatgtgggagagtcccctgacccccctctcaggacgtgtgacagggctgtaggggagtccactgacccccctctcaggacgtgtgacagggatgtgggagagtcccctgaacccccccctcaggacgtatgacagggccatgggggagtcccctgaccccccctcgcaggacgtgtgacaggactgtgggagagtcccctaaccccacgtgcaggacrtgtgacagggccgtgggggagtcccctgacccccctctcaggacgtgtgacagggctgtgggggagtcccctgaccctgcatgcaggacgtgtgacgggtgtggctcatctgtttggctgctgcgtgctcaaagagccttagggaagggagagcacacagataggcaggtgcaggagctggggtgagtgcttttgggctctggccctgcagtagcatccaggggtggggtgtctgtgactcccaaagccgcggtgggtgtgctacagtgctcttttagcagttgccacccacagatggcttaagtattaaccagctcagtgccctgttgatacccaggttcttatctggcgtccaggaagaatcaggtcacagggacaaattgaaggatggcaaatgtgggggattttactgctggatggaggtggctctcagtgggatggatggggagctggagaggggatggagtgggaagggatcttcccctggagtttggccgtcccacagccaatctcctttctgactgtccccagccgaactcctcttgacattcacacgctccttctcttctctccttccctgacacgccactcttctgttcctccgctcttccactagtggagcctggggcttggcatttacatgggtacaggataggcaggcatgggaggccaaaaggcaacatttgggcacaaaaacaggaatgcctgttcccattgagggccacaggtttccaggcttgagggcggggcctttgccggggaactaccctcttctacccagaatttttctgccacctgcccatatcagtgatgcttttctcagggaaaactgtagttgcaatggatttaatgttcagctgtgctgtcccaccacatccccgagatggctgggtttggccacaccaggagcttgagcctggctgccttgcatgctctcctaaaatgtctgccccaagacacagctgccttgtctgctgcccwcattgtgcctggactatgcctgtgtcctgggtactctgtaaacatttgctgaatgagggactaaatgagcagtgaatcacatgacaagccctctgctgatgccctgtgggcacytgcctggtataattctggtgagttgggagctgtggggaggcccagtgctgccaggtttaggcacctttctgacttcatgctctggccggccactgcctctcatatttagggtctcactgccacgtgaagcagctgagagctggtttcccccatgaaatacgtctgctgctgagcctcggggatgtggagtttctcatctatcttttcctctgcgcctcaggccaccatgctctgtgtttttaagcaggaagggattttagcccgaccctttattattttctgttacattttcccagttaaatgttacatatagtagaaatctgtagacttgaagtattcaattctgtgagttttggcaaatgcacccagcatgcagcccctgcctgtgctgtgacttagaacatttacatcacccagaaagttcccatgaaaccgcatccccgccccggaaatgacttctcccattcctttgcacgatatgcttggtttctccaggtctaaagcttgctgttctggatttccgcagggcattctttaatttctgcctccagcctccatctgtccacttgctgtgtgtggacggtttgtctctgttttgaggggagttccattgagtggatgcgccatgtttcaaacccactttcctgttgacgggctttgttctttctttttttctttcttcagtttttggcgcctatgaataaagtctctctaaacattcttgtacaatcctttttacagatcgtgttttgtttctctcgggctagtgtccaggagtggagtttctgcgctgttgatattgaggtgtgtgtctatgaggagctgcagggtctggtttcacaggagygagtgagtgtgtgggtggctctgcagccttttgccagtgtgttcttggcctgcagcattggccttttgagttggtgtttgtggagagttccatttccagtggtctgtcctggaggtggctccctcctcctgacaagggagctttgtgattggatttttggtgtttgagacccagctcttccccttcactgctgcttggacccagagcaaacccctcagctctagattctgtttcctctgtttgcggtggggatggtaagtgcacttgccccaagggtcagaagggccactgcgagggtcagaagggcccgctgcctgagccctgactccagcgccgggcgcgtgggcgtcgtgttgccaccgtgggaacagtcatcacactctgcccgtttccctcagggcccagcccagcacccacagcgtctcatcttctcatctgtgcatttgagagttatccatgcaccaggtaggcagagacagaatgctgggcttggcaaaggctgagacgcagagagacgggagggccctccccacactcccatccagagagggcgcccagatgctgccagatgagagcgtctccctttcctggcctgcaggctggctgctactctgcaggtgcatgggctgaaacagttgctatttatttgaatatttccaatcctgctccttcttcaactttcatccggtgggaactggccgcactgcagtgtaattcttcatttcaaagatggatgaatcacattaattgcacagaaaaccatctccaaacctaaaacaaccaaatgtgggtgccaggagagacttcgtttgcttcagtggcagctggtctgtttttcctctgaagagattaagcaaaggaacccttagtaactgtgtgtgatacaaagatggtctgtcagcctttgggaatactagtttactaaaaagaaatatttctttctttcaatcaacagaactgtacttgctgaagataaacgtgcttaagaacatgcagctaacgctatgaaattagcgttactcacactcagttggaatagaagtgccttcaaccttttagcaaaggcaagagcaaattatagcaaaaaactcatttcagaagtcatctttgtgcagaataggccgggccccgaggtcaaggcatccatttggcactctatttccataatgcgattccgcagcgtacgggcgtcagaggaaagcacatctgctgtcatattagtcttataaatgccgacgttaatgctcctttacagacaaggccatcttgggggtgtggccacaggagtttcctctgcctggaagtccttgatttaagaggccgctgggtggaaccttcggccgtgctgccctgtgcagcgcatcctctggcagcctccctgtagtggccctgctcagtgttaccttcggtgttctagagtggccaggtggccccagatcgcaggagggatgcccggaagctgtcaggtcggggagtcttagcagccctatgtggctgcttggaccctgggtgctgaatcacagcctggagaactctgcctgtcaggactatgcatgccttttgatttgtttgcttaatatatatattttttcctgcacttaaagataatgcaagctgtataaaaaacagaaataaaaaccaaaagggagatgcccatgaagctgaatcagagggtgactagatgctggggctgtcttggggcactctggggatcagcgtggtggagatcagctccgggaaccagcgtggtggggaccagctccggggaccagcgtggtggggaccagctctagggaccagtgttggggggaccagctccagggaccagcacaggggagaccagctctggggaccagcatggggggaccagctccgggtaccagctcatgggagaccagctctggggaccagcattggggggatcagctccagggaccagcgttggggggaccagcttcggggaccagcgttggggggaccagctctggggaccagcattggggaggccagcttcggggtccagcctaggggtgtccagctccagggaccagcgttggggggaccagctccggggaccagcgctggggggaccagctccggggaccagcgttggggggatcagctctggggaccagcattggggaggccagctccagggtccagcctgggggtgtccagctccggggaccagtgttgggggtccagctctggggaccagcacggggtgggcaggtgagactccacggggacctgtttgagctgctggggctcggggcaagcctccctctgtgcctgcagtgctcagccagaagtgctcatccccggaaggtgtggccctgcgagggggtcttccgcacacagccagcgcccaggagggctgatggcagagggtgtctgtggcgtgactcacagaacctcatccccggggccacgacggacgctgagtgcgctacgtccagctgtgtgaggttcatctctcccttttagaaaattacatccatgggtttatattycttttytcaataagtactatatcttgagcatgtcacgttatctgttttataaatatgatatttaatgtggtgtaatttaattattcacctacrgttggaaattcctttgtttctcaatgtctgattcttagtaagcacatctttgaaaacgaacggttttccgcatatgaatcrtttccttagaacattcccctagaagtgaaattcctaggtcacttggtgtgtgcatttttgagagttgctgaattttccttccgagaacttgcataaagttcctctctcaagcgtgaggttcttgttgcatcacaaggtcatcaatgtggatgtttattagtgaagaattttaattgtgtaggaaaatatgcctcctcgttttggttttcatttcttatgctaagtttatgttttcttttatgaattttattggtaaaattgttacaaatgttaatcaaayaaaacataaggatatattttattctcatgtatttaaaaatagaaggttaaatcttcatgaagtgaaattaatcttttttttttttgctttcctttgcttgtttaggaagtctttcttattataggatctgataactattcacctaattttttccttcctttttttcacctaaatttttcctgccaaaaaaaggttttacttgaatccatctaagccattggagatccatgttgctgtcagggkcacttggccgtgttatccttgtccacactgtgggcccgtgtttcttccctgcgcagtcacatacctggtcaagtttgttcctaggtatctgaaaatttttcgttatgaccgagtgagattattttttctcatatttcccaaatgacaattgctgctacattttttactttttttcttataatgggctgctctaccaaaactctttcattgtgatagttcgtttgattctttagaattcaaaaacagttgtgtgtaagggtgttttaaaaattgttaattttgtgtggtatttagtaaactctgaatcttcagatgagcatctttggaagtggaagtttttttgtattccacttttgcatgttgctttctttcatttattctggttctcccagcctttattgattgattgatttttaaaaatttttttgagacaggagtctcgctctgtcacccaggctggagtgcagaggtgcaatcttggttcactgcaagctccacctcctgggtttatggcattctcctgcttcagcctcctgagtagctgggactacaggtgcccaccaccacgcccagctaattttttgtatttttagtagagacggggtttcaccgtgttggccaggatggtctcagtctcctgacctcgtgatccacccgcctcggcctcccaaagtgctgggattacaggcgtgagccactgcgcccagccctcccagcctttatttattttttctttttatttttgagatggagtctcgctctgtcacccaggctggagtgcagtggtacaatctcggctcactgcaacctctgcctcccaggttcaagcaattctcctgcctcagcctctcgagtaactgggactacaggtgtgtcaccatacctagctaatttttgtatttttaatagagatggggttttgccgtgtcggccaggctgctctcaaactcctgacctcaggtgatcggtgtgcctcggcctccctaagtgttgagattacaggcatgagccactgcgctggcctctcccagcctttaaaaggcagttgtccttatgccaaatccccagtcagtcaccgccgtgcaccagtttctcctgcagtgttgatcacctcgttcccatcgtctgtagctaagctcctgttcacggtggctttcgtgtgactgaggtgacttcccgggacagttctgccctcggtgtttctgactgggcctcctgcccgctgagaccacactgtcctcttcacagacttccttctcagtctgtctgccgcccagtcaggtcggggacttctggagtgctgttatcttgctttttatggttgtcattttcttaaatttgagaacacaaatcagatgctttttagaatttacatgggtttccaactgtaatttttaaaacctatttattttcctgtaccttcaatgtaggtttgccttttccgtgctacagaatcattttgtggctctcacatggtttttctgtttcagtgttccagtttctctgtgtatgtttgtaactatgttttcacgtttttatccttataacgggaaatgtgtaatcagggctgatatttaccaataaacagattggtgaatgagcagattccccttggcccttttactttctctactggacagtgggaggcgtttcctctcggttcaggcagatgccatgtgtggcctcaagtcagcctggtgctgatagcatctgcccagtggccccaggttgggggggtcctgttctgacccccggcaccctcaccatgtgttgagtgattcacttttggacactctgtgtattagtcagggttctctagaggggcagatatatatatatcatattagttacatatacgtgtatgtatataactttataggtatatatrtgtgtgtgtgtgtgtgtgtatgtgtatrtrtatayatatatatataaaggggagtttactaagtattaactcacatgatcacraggtcccacaataggctgtctgcaaggagagccagtccaggtcccaaggctgaagaacttggagtccaatgttcaagggcaagaagcatccagcatgggagaaagatgtaggctgggaggctaggccagtctagtcttgtcacgatattctgcctgctttatattctggccatgccagcgactgattagatggtgcccacccagactgagggtgggtctgcccctcccagtccactgactcaaatgtgaatctccttcggcaacgccctcacagacacacccaggatcaatactttccatccttcaatccaatcaagttgacactcagtgttaaccatcacactctggttcctctggaccccacacaattcctgcctcttcacctctgtctggcagagctctcatcctaaaattacagtttctgtgtggccacagcaaggaggaagacttggggggtcgaggatggtggggcccagctgggccttgggtctctgagggacctgcaggggagggggctgagtgctgtccttcctccctggggagccccccagctgctctgtgccttggtccttggacgtccctgtgcagcaaagcagtggcctcctggcttccacacctgtcatttctcatttactgtgcgggcgggccaggccaggaactaacagtttcatatgaacttcacctaaaagtccacactgagcttttcaaagtgtggctgtcggcttccatcatgtatggaaaccctacttcatctacctggtcatcactgtgatcagtgctagcccagccagtgatgctggtaggaataccattttttctttttcaagaaagtttgtaatgaaagctttaggtagtcgctaagaaaagtcaagatttgcttctctgaagtcaacacaagcgggggcctcccagggaagctgtggcagctgttacagggtcccgcttctctcctggtagggatgttccagttgggttcagcctgctgccgaatatcctgggaggccggtgcaggaggctctagaatcaacctgtactgtaaacgtttgccctgttgaagttatggaattacaggacaaattctctgacttagatatgcagtggtgtggacagtaaagcctcatcaataaggtttgtattaaaatgctcggtgacttctggtgctggtcaaatattgttctttcctcagctcaatttaaaggttttcctcctctgggaaacttgcagaagggaaagtcaaactcaggaatttggtgtcttgaaacaggaacatggccctaagttatggtgggagcagatgagccattcccaaatgctgctgccatggttgaaatttgtaaaccgtctggagaaacggtccatataattgaatcttttgaaaatgaactcattatggagagagttgcattttagaggggaatgactgagcatctgatgggctctgggccaaggaggtcaaacgacttttccttcattctgatagccatggatgggttcaagagcttattttttactctctggaaaaaaactaacattaatagagcttatcccagacttcttggggctatttccaaaggacagaatgctgaggctcacttacaacgtaatttcgtcatccttcgcccgcggagagctaacccatggtgaattaagcaggtgactgacgtgctccccaggagccagcctgactccagcacagtgtgagtgccaccgcccagcctcccagttggtgcctccatcctgtgaaccactgcgtcctcctgcccatgatggccgtggcctttccctttcccaccagtgaggatatctgagtaccacagagctcaggtgagggaagtcagcagttgtctagcatagcttccgtattttacaggtgagaacacaggacttggagaatcgggggctcatggccacatggggagtgaatgcctgtgtgtggaccagaggcctggccgtccacctggggcatctgtgcccccgccayacttcccaattcagctggcgtagcagcaggagcattcttgtgcctgggccagatgcttccgagcactgggggctggttgaccgaggagaagtcagctctgtgggtgtccctgcagcctggggcacgagtcctgagcttgtctctcattccaggtgctgttgcctttcctggcaacttatctaggacttttctgatgcagaggtcactgtttctcccctgaacccctaagctatgcttttccagtcctgggtgcacgggagcggcactgcccagcacagacagggttatgtagcagaaacactccctggaattggcaaaggcaccgctttgctgttttaaatcctatttgctttccttgtgacgtcttyggtcattttcatggtttatttccattcacaatacccctggaaacagaaaccagctaaacgactgcagctttggatctctggtaaccagaagcaaagacaaaaattcaggaatgagaaccctggccgtcaatggcgactgatttcagaaattgaaaatgtccttaggacaagtcccagcaaatgtggcagaagaaccacccatggtccgcagcaccacgtccttccagccgtgtatgtctcggtggatggaggggctgcyggggctctgcgttcggggaaacaaggcgctgtgggcttgttcccgggttgccatggcgattcctcattatctccagtcacagagccgtgtgcagggtattggcagcttacacatgtgctgcagcttctcccagggatgctgtgggtgtgtgggtgtgtgtgcgtgtgcacgcgtgcattgggctgtggcttctcccagggatgctgtgggtgtgggtgtgtgtgcgtttgcaygcgtgcattgggctgtggcttctcccggggatgctgtgggtgtgtgtgtgcatttgcacacgtgcattgggctgcagcttctcccagggatgctgtgggtgtgtgggtgtgtgtgcatgtgcatgcgtgcattgggctgcagcttctagggatgctgtgtgtgtgtgtgcatttgcacacgtgcattgggctgcagcttctcccagggatgctgtgggtgtgtgggtgtgtgtgcatgtgcacgcgtgcattgggctgcagcttctagggatgctgtgtgtgtgcgcgtgtgtgtgtgcacgcgtgcattgggctgcagcttctagggatgctgtgtgtgtgtgtatttgcacacgtgcattgggctgcagcttctcccagggatgctgtgggtgtgtgtgcatgtgtgcatgtgcatgtgtgcattgggctgtggcttctcccagggatgcagtgtgtgtgtgtgtgtgcacgcgtgcattgggctgcggcttctcccagggatgctgtgtgtgtgtgtgtgtgtgtgtgtgtgtgtgcacgcatgcactgggctgcggcttctcccagggatgctgtgtgtgtgtgggtgtgtgtgtgtgtatgcacgtgtgcactgggctttggcttctcccagggatgctgtgtgtgtgtgggtgtgtgtgcgtgtgcatgtgtgcattgggctgccgcttctcccagggatgctgtgtgtgtgcgtgtgcattgggctgcggcttctcccagggatgctgtgggtgtgtgtgcgtgtgcatgcatgcatgggagcagactccacgcatgccagttctaacgggcttcaacaacacctgagctctgctggagcacgtgctgtttccaatgggagcgaacgtgtttcctgtcactccagctgattgatctgaatatcagggaatcgatgtcatgtgatttcttttgtaggaagagagggaggagagacaaagggaagagaaggggaagggaggggtgaggaagggaagacagatgggaaaaatcacaccctcgttggttgtgaggagcacaaaaattgccgttgtcagaagtgccgatgaggtctgcctccagccccgctggcctccggagccctgagaaattcccacggaccgtccaacgcgatggagactttgtgcggtgactgtggctcacgtgaggcgctcgcaaggacggtttcccacttgcgtgattccttgtcctgagttatgggaaacgctttcgagtctggggttttttcagattgtgtctgaagagtgaaggctatttattaaaatagtgtggagtaaaccacccaatttgaccatgactttagggtgagaacgtgtgtgtctgtatgaatgtatgtatgtgttgtgtgtgcacatgcgtgtgtgtgtgtgaatgtgtgtgttgtgggtgcacacgcatatgtgcaagggtggttgtgtgtagtgaacctgttgctgttagctgcctgctcaggtgtgaccattctcatgccgttccgttatttcttttttggtagaagtcaagtgcctatgactttccaggccacagtccttggcagggtgtgtatttagaggtaaacatgcctggagacctgtgtgtgtggacagagagaggggaggagccccggctatagacgatgccccacaaacacatccgaggcttggatgacgacttcccagctgtgtgatcaaaactcccgggatctggggctgggacggagaattatgcatggagatcctcactctcagcgtgtcagcgtgaagtctgatgtttaattgaacatctgtctgcctttaatatgaacctcattattaagcttacatgtgactgtctctttgcttgtattctcagatcttaggagatctttaaaaaattgatttataaaccagaaaaagagacattcttggtcacacttacctgaatacgaagtgaggatgggggctctgcataccctgctgtgggaagcatggcgagaggcaggtgaagtgaggatgggggctctgcataccctgctgggggaagcatggcgagaggcaggtgaagtgaggatgggggctctgcagaccctgctgtgggaagcatggcaagaggcaggtgaagtgaggatgggggctctgcagaccttgctgggggaagcatggcgagaggcaggtgaagtgaggatgggggttctgcagaccctgctgtgggaagcatggcgagaggcagatgaagtgaggatgggggctctgcagaccctgctgggggaagcatggtgagaggcagggtttttggtcttaaggaattgatttggttcccaaagccccattggctagaaggtcactgactgcctcatcgttcgcctttcaaagagaagaatgaaacagcgtccggcaggaggcgatgtctggggaagcgtgtgtgtgtctccccatgtgcatgtgtgtctgtgcatgtgtgtgtgtggttgtctgccagcctgaagtccccttttctgtcatattctagtccactgtgatcatcaccagagactcctccatccactctctccatcggccacctcctctccctgacctgccagaggcatccgtggagacccagacactggggttcctgagctgcaggccagccgcttcccaggccygtgccccgccccctcccgacctctcctggctctctcacctcagagctctgggggccgagcgccctgggacaccctaagtgtctcacctcggagttctggcaccctgcctgtctcactgtatcagcatgcgcggttctctcctaggcaggcacgattttatgtttgtctgggaaatgtgacgatcaagactgggtgaggcccttccaggtcaggtggtcaggaaagcgctcaccaggaattgtgtgcaggcttcgacggggctgcaggacctctctggtcagagaatgaattcagagctgtgggctgagtttcacttgtatgttttgttttttccgaaattgggctcgcagtggttccagcgtgggtgtgacttagttccagaggctctggaggaggcggcctccccaagcaaccgagcatcctcccatagcttctcagggcctccgcgagcacctgagcgtcctcccatagcctctcatggcctcccaagcatcctcctgtagcctctcgtggcctcccgagcgtcctcccgtagcctctcctggcctccctagtgtcctccccttgcctctctggtggaggctcagcgaaggctggcgagctgctgtccatggtgctggccatctggccccagggaaagggctttcgagagtggtgctccacgggtcctgtccccctcggctcatgacgygcggtgcataatcctgcggagacasctggggccgcctctgttccayggatcatggggaccagggccacctacaacatggtggcctgaattgcgattgtgtctccagtggcgtcgttttsagacttctctttaattctgactcttaattctgactcaaggtccccagagggacggtgactgagccagtcccatctggggctttggggctactgcccctgggatgtttgggccccagaagtgaacactaacccttggaaatctgcagggctttcagacccctgccttccttctccactacctctcatctggactcgagttccctgattctctgcattttcaccaggatgaggtggttgtgatggacaaacctgacttacggttttatacgcacatccagttatctccttagaatatatctttagcagagaaactggggctcctggggcttggccattttaaaacttcagtcaagttgcaaatttgtcccttgtagaggggacacctaatttgtgcccaacaaaatgtagatgagtccatgtcattcaccagcaacctgagttatcccacaaagtcctttgcctttctgaggtctgatgggcagaattgtcacattgccttaattaggccatctttaattacaaataaagtcaaatttttcttctctctctstgagtaaatgagttgtggacatttttttcttcctgtgctttggggccagggtggcctgaggaaagtgccgggcacaggggctctgtcccttcatcctcttgccacacaggacagtgctggccttgggagacaccaggctgaggccgggcgggcaggggcggcctcttccgcctcctcctctggacagcccagagctgagttaggagagctggggcgatggaggtccaggaaaggtggtgcctgctggtgcagctgtggcttctctgcatttctagtctgggctgggctgtttgttgatggaaaagaggcccaggctgggaggttgatggtagcacaggtgcagggacgggatgagtgacagagagacggaggaaagatggaacccacgatggggaaggggctgggattcagggccaagaagcggaaggaggagagaagcgcggatgagctccataggcagggtccaggctcagcgggaagagctgggaagagggggatgagggagaggcagggctcaggcagagacacagtgaggactgggcagtgccggctcaggttctcaggagggcctgccccagccagaccatctgtggtgaaggtgagcccacacctggctccaggcactgaccttcctggggcccttgttggtatctgtgttgggggaacacagatccatgcctgcctaggatcccccaggagggtccgggagtgcccccaaggtccatggtgggcatctgctaacagcctgtcctgagggcagggctggctccggggctccagatcgtctgtggstcagctctctctggagggctgtttgggtctcaggtctgaatattggagcccagggcttcagtggaactgggcagtggggatttctgccaggtgtggatgggctgagcagcaagaaagagcaaaagaggtttacacagcgtccttctccagccagctgtgatggggtctgggcaaggatggatgaagagtctgtgggttgtcctggggaggggtggacatggcgtctgtgcgtcatcctgggtgagggtggaacgtggagtctgtgggttgccagggtgtgggtggatgtggggtctgtgcgtcatcctgggtgagggtggatgtggggtctgtgggttgccaggatgagggtggatgtggggtctgtgcgtcatcctgggtgagggtggacgcggggtctgtgggttgccaggatgagggtggatgtggggtctgtgcgtcatcctgggtgagggtggatgtggggtctgtgcgtcgtcctgggtgagggtggacgcggggtctgtgggttgccaggatgagggtggatgtggggtctgtgcgtcatcctgggtgagggtggatgtggggtctgtgcgtcatcctgggtgagggtggatgtggggtctgtgcgtcgtcctgggtgagggtggatgtggggtctgtgcgtcgtcctgggtgtgggtggatgtggggtctgtgcgtcgtcctgggtgagggtggatgtggggtctgtgcgnnnnnnnnnnnnnnnnnnnnnnnnnnnnnnnnnnnnnnnnnnnnnnnnnnnnnnnnnnnnnnnnnnnnnnnnnnnnnnnnnnnnnnnnnnnnnnnnnnnnnnnnnnnnnnnnnnnnnnnnnnnnnnnnnnnnnnnnnnnnnnnnnnnnnnnnnnnnnnnnnnnnnnnnnnnnnnnnnnnnnnnnnnnnnnnnnnnnnnnnnnnnnnnnnnnnnnnnnnnnnnnnnnnnnnnnnnnnnnnnnnnnnnnnnnnnnnnnnnnnnnnnnnnnnnnnnnnnnnnnnnnnnnnnnnnnnnnnnnnnnnnnnnnnnnnnnnnnnnnnnnnnnnnnnnnnnnnnnnnnnnnnnnnnnnnnnnnnnnnnnnnnnnnnnnnnnnnnnnnnnnnnnnnnnnnnnnnnnnnnnnnnnnnnnnnnnnnnnnnnnnnnnnnnnnnnnnnnnnnnnnnnnnnnnnnnnnnnnnnnnnnnnnnnnnnnnnnnnnnnnnnnnnnnnnnnnnnnnnnnnnnnnnnnnnnnnnnnnnnnnnnnnnnnnnnnnnnnnnnnnnnnnnnnnnnnnnnnnnnnnnnnnnnnnnnnnnnnnnnnnnnnnnnnnnnnnnnnnnnnnnnnnnnnnnnnnnnnnnnnnnnnnnnnnnnnnnnnnnnnnnnnnnnnnnnnnnnnnnnnnnnnnnnnnnnnnnnnnnnnnnnnnnnnnnnnnnnnnnnnnnnnnnnnnnnnnnnnnnnnnnnnnnnnnnnnnnnnnnnnnnnnnnnnnnnnnnnnnnnnnnnnnnnnnnnnnnnnnnnnnnnnnnnnnnnnnnnnnnnnnnnnnnnnnnnnnnnnnnnnnnnnnnnnnnnnnnnnnnnnnnnnnnnnnnnnnnnnnnnnnnnnnnnnnnnnnnnnnnnnnnnnnnnnnnnnnnnnnnnnnnnnnnnnnnnnnnnnnnnnnnnnnnnnnnnnnnnnnnnnnnnnnnnnnnnnnnnnnnnnnnnnnnnnnnnnnnnnnnnnnnnnnnnnnnnnnnnnnnnnnnnnnnnnnnnnnnnnnnnnnnnnnnnnnnnnnnnnnnnnnnnnnnnnnnnnnnnnnnnnnnnnnnnnnnnnnnnnnnnnnnnnnnnnnnnnnnnnnnnnnnnnnnnnnnnnnnnnnnnnnnnnnnnnnnnnnnnnnnnnnnnnnnnnnnnnnnnnnnnnnnnnnnnnnnnnnnnnnnnnnnnnnnnnnnnnnnnnnnnnnnnnnnnnnnnnnnnnnnnnnnnnnnnnnnnnnnnnnnnnnnnnnnnnnnnnnnnnnnnnnnnnnnnnnnnnnnnnnnnnnnnnnnnnnnnnnnnnnnnnnnnnnnnnnnnnnnnnnnnnnnnnnnnnnnnnnnnnnnnnnnnnnnnnnnnnnnnnnnnnnnnnnnnnnnnnnnnnnnnnnnnnnnnnnnnnnnnnnnnnnnnnnnnnnnnnnnnnnnnnnnnnnnnnnnnnnnnnnnnnnnnnnnnnnnnnnnnnnnnnnnnnnnnnnnnnnnnnnnnnnnnnnnnnnnnnnnnnnnnnnnnnnnnnnnnnnnnnnnnnnnnnnnnnnnnnnnnnnnnnnnnnnnnnnnnnnnnnnnnnnnnnnnnnnnnnnnnnnnnnnnnnnnnnnnnnnnnnnnnnnnnnnnnnnnnnnnnnnnnnnnnnnnnnnnnnnnnnnnnnnnnnnnnnnnnnnnnnnnnnnnnnnnnnnnnnnnnnnnnnnnnnnnnnnnnnnnnnnnnnnnnnnnnnnnnnnnnnnnnnnnnnnnnnnnnnnnnnnnnnnnnnnnnnnnnnnnnnnnnnnnnnnnnnnnnnnnnnnnnnnnnnnnnnnnnnnnnnnnnnnnnnnnnnnnnnnnnnnnnnnnnnnnnnnnnnnnnnnnnnnnnnnnnnnnnnnnnnnnnnnnnnnnnnnnnnnnnnnnnnnnnnnnnnnnnnnnnnnnnnnnnnnnnnnnnnnnnnnnnnnnnnnnnnnnnnnnnnnnnnnnnnnnnnnnnnnnnnnnnnnnnnnnnnnnnnnnnnnnnnnnnnnnnnnnnnnnnnnnnnnnnnnnnnnnnnnnnnnnnnnnnnnnnnnnnnnnnnnnnnnnnnnnnnnnnnnnnnnnnnnnnnnnnnnnnnnnnnnnnnnnnnnnnnnnnnnnnnnnnnnnnnnnnnnnnnnnnnnnnnnnnnnnnnnnnnnnnnnnnnnnnnnnnnnnnnnnnnnnnnnnnnnnnnnnnnnnnnnnnnnnnnnnnnnnnnnnnnnnnnnnnnnnnnnnnnnnnnnnnnnnnnnnnnnnnnnnnnnnnnnnnnnnnnnnnnnnnnnnnnnnnnnnnnnnnnnnnnnnnnnnnnnnnnnnnnnnnnnnnnnnnnnnnnnnnnnnnnnnnnnnnnnnnnnnnnnnnnnnnnnnnnnnnnnnnnnnnnnnnnnnnnnnnnnnnnnnnnnnnnnnnnnnnnnnnnnnnnnnnnnnnnnnnnnnnnnnnnnnnnnnnnnnnnnnnnnnnnnnnnnnnnnnnnnnnnnnnnnnnnnnnnnnnnnnnnnnnnnnnnnnnnnnnnnnnnnnnnnnnnnnnnnnnnnnnnnnnnnnnnnnnnnnnnnnnnnnnnnnnnnnnnnnnnnnnnnnnnnnnnnnnnnnnnnnnnnnnnnnnnnnnnnnnnnnnnnnnnnnnnnnnnnnnnnnnnnnnnnnnnnnnnnnnnnnnnnnnnnnnnnnnnnnnnnnnnnnnnnnnnnnnnnnnnnnnnnnnnnnnnnnnnnnnnnnnnnnnnnnnnnnnnnnnnnnnnnnnnnnnnnnnnnnnnnnnnnnnnnnnnnnnnnnnnnnnnnnnnnnnnnnnnnnnnnnnnnnnnnnnnnnnnnnnnnnnnnnnnnnnnnnnnnnnnnnnnnnnnnnnnnnnnnnnnnnnnnnnnnnnnnnnnnnnnnnnnnnnnnnnnnnnnnnnnnnnnnnnnnnnnnnnnnnnnnnnnnnnnnnnnnnnnnnnnnnnnnnnnnnnnnnnnnnnnnnnnnnnnnnnnnnnnnnnnnnnnnnnnnnnnnnnnnnnnnnnnnnnnnnnnnnnnnnnnnnnnnnnnnnnnnnnnnnnnnnnnnnnnnnnnnnnnnnnnnnnnnnnnnnnnnnnnnnnnnnnnnnnnnnnnnnnnnnnnnnnnnnnnnnnnnnnnnnnnnnnnnnnnnnnnnnnnnnnnnnnnnnnnnnnnnnnnnnnnnnnnnnnnnnnnnnnnnnnnnnnnnnnnnnnnnnnnnnnnnnnnnnnnnnnnnnnnnnnnnnnnnnnnnnnnnnnnnnnnnnnnnnnnnnnnnnnnnnnnnnnnnnnnnnnnnnnnnnnnnnnnnnnnnnnnnnnnnnnnnnnnnnnnnnnnnnnnnnnnnnnnnnnnnnnnnnnnnnnnnnnnnnnnnnnnnnnnnnnnnnnnnnnnnnnnnnnnnnnnnnnnnnnnnnnnnnnnnnnnnnnnnnnnnnnnnnnnnnnnnnnnnnnnnnnnnnnnnnnnnnnnnnnnnnnnnnnnnnnnnnnnnnnnnnnnnnnnnnnnnnnnnnnnnnnnnnnnnnnnnnnnnnnnnnnnnnnnnnnnnnnnnnnnnnnnnnnnnnnnnnnnnnnnncgtcgtcctgggtgagggtggatgtggggtctgtgcgtcgtcctgggtgagggtggatgtggggtctgtgcgtcgtcctgggtgagggtggatgtggggtctgtgcgtcatcctgggtgagggtggacttggggtctgtgcgtcatcctgggtgagggtggacttggggtctgtgggttgtctgggtgaggaaggatgcagcgtccgtgtccccttcacacgctgctcttaaggagcgctgtgagatgtcccactgaggggcttgtcttctcactctccacagctgacatctccagtgttaggtcttgggcaccaaggaggggccaagctaaggtgctgtatattaaaaactgtcagaggaagaaggctattccatcaggaatgccttcttcaggcatctgggctctcgcttgggctgccattcttaatcatgttttaattttcaaataaattgctttcattatccgttcatcgacaacaccacgtgtacattactgctcattaatgtttgtcagctactgtgctgaggctgggtttttaaatagccatggtcacggtgcagtaattaatgatgacccatgttggttttacagaattattattatgtttaatctttgaaaaaacaacctagagtgtcgcggtgttgctgaaagttgtcctcaggctgcaaatctttgaaggccgcaggagtccttgggcaggccttcgtgttgacctgggagcagtccttttatggctccagctgggtccccccggctggccgagcggagtgcctgggtggcactgaggaccacctttcctttgtgactgtgtgttggcctcgccaaatgacctcttggccaatgtgataccaaattaagtttcttgaaaaaacatccaytatttaaagcattcatttcgtgcttgaggtctgatcctrttcaaatcagaagccaagacattttcaacgttagtgatggtcgcctctgtagacttgtgtctggttaaagttgtgagtattgatagcgtcttcccacctgtgcgtgaatcactttggatttctggggtctgagcagggactcgccggccatggccttgctgatggggcctcccagatgctgcctgccttcctgtggttggattagctatgctggggccttgaggtcatgctcatcatcaacctcayagtccagactccttagagtggggatggcgtccctcccatccagtttctcatttattcagtaaaccttttatcacttcttaaagactttcagtaacttatacataagaatgaccattttaaccatttagggatatagttcagtggtataaaggatattcacactgctgtgtagccatcaccaccatccacctgccaactttctattccaaacagaacctctgtgcgcattaatgctgactccccctccccaaggccctggctgcactcagtgtaccttctgtgaacctgaccatctgggggccacgtatcagtgcaatcggagcatgtgcccggctgcagccgaacgctaaaggcagcaccgcgtgctcagggctggtgcaggtgtggactgtgtcagcgtctccttcctttctgaggctgagtcccattctgtcgtgtaaatagaccacgttctgtttctccacccctcagctgctgggcgcctgggttgtttctgtgtctggcttctgtgaataacatgctgtgtgcgtgggggtacatacacgtatttctttgagtcattgctttcaagtctggtaaattttcatgaaaccatttccgtcggccgaatattgtgataactgggctttcagtgtgtctctggaggccaggaagggcagagccgcctgcagccctcctccagcccatccttctgagaatggctgagcttccaggccatgctcctgaaaaaggtgaagctgagggcaggaaagagggccccccatggctacctcagcccacgcccctcccaccagtttaagaccaggccggaagaaaggtgggcgtagggcgtctcaggtctccctgtggttggtttggggcagcctcccgaggcttgctgggcacccagtccccgcctgcaggggtgagccgggctgctgttcccactgtcctgggctgagttcatgtattcgagtaactcacaaagttgggccttccattctaaggagccaccttaagccttgtgggagggccagagagagaaaaagagagagacagagacagaaagagagaaacagagacatgcacacacaaggggaggggaggagccccatgcacccctgattgtaagtgtgtcccctactttgcccttggcttggccggggccctctagttggtggtgggacggtgagccagagttgagggctggcggctgggttctgagagccgccactgtcccaatgggacacccctgctggacgcaatgcgcctcctgccttgtgagcttcctgccctgggaccaggcccttctttctccccggaatggtccctggaaccttacgggacataagagctgggtcccggttgcttggcagtggctgctrcaggcttgctgatggctgacggctgcacagataagctgccttcctcctctcctgccgcttttcttagcacccgcagctgacggtgcctgtgtgacgccctcagtgatttgggtgggcctgggctgcgcagcaaatgcaggttgcccagcaccctgaaggccagtgttgggccagcccctggccttgtccggggtctggccttggggtgagcatagcctggcgtctaccgagcaagccaggaagccaccatttgtgtctgtgatggaggcacctcctgtcacctccacagaaagagtcaaaaccacccctgaaatcactgaggtgctgccacagggcgtcaacgacagcctggccctcgcctttgggtggtgccgctgggccagggaacccacagacctgccgcagaggcctgcaagccgggcacccactgccgggcgtcgttttgtctcctttctcttttatgtaatgtggatgctttcccccagtaaactctacctgcaaacaagccccgtgttcacatcattcgtccggttcctcttccgtcctcaaatcttggtttctattttctggttgtttgcacaggaccatggaatttcggaattggagatgttcctgccattgggttccactctgttacttgcagaaaaactaactctgcagtccagagaggcctggtagccagacggaggccgctctcccggccagcacagagcccacctgaccctgtgctggggcccaggatcttcccagccacagtttcgatgatgatcgtgatgggttttacttggtccccagaagctttctcccagtcagtccatttctcctgatttccccatagaaaagctaagagaaaatttatcagaaattatttctactttttttttttttagctcttttcaccttttgctttgttatgttatgaattgtgacctatctggcccctcaaataaaatgtgggctccttgcagcacaggctctgtctggctgatctttgtattttctttacgcacagcgctcagcatggtgcctggatggtggtgcctgctcagcatcagcctgtttatttaagaggtgtgcatggggttcttatctgccgggtgggaagccctgtgctccacagattgctggcagtgttgggtgaggacttcaccactgttgtttttgattatgttcaactttccttgtccaaaaaaacccaaggaagcaacaaaaagatactctatgagttgatgaatttgaagtgggaatgtgatagggaaggaaaaagaagcaaatgttcccacaaggtcaacagagttcctgcaactaagccttaaggttgcctttgagctcccagaattcaggatgaaaggggaaaaagataagttgagtggggctttataaataaaaaatgcatgtagtaggttagacaaagggaaatgagtgacttgttggttattttagattcccgaggaaatttttgtcaacagtgatgaccagcttgtattgtctttattttcagaaatggcagtcttttacattggatgtcctttatcccaactgtgaaaactttaatcatttacttaaataccataaagacagccaagaagacattttccattgatttatatgtgtgtgaaaactcattgtgaaaaaacttgtaattttccataataataaaaaagctttgattgagggctcaatcactgtgggcccatgacggctgctaggctgggtggtggcgcctggaaccacattctgtttcgagggcagataagcagagaggcagcagggtcatcatcagcctttggcaagaacagccttcccgcatccccacgtggaggattcgcatctgcctgtgagcgaggtctcaccccatcatcttggggttcacgctcacgctcttcccctgcgttccctggatgcttccttcaggctggctcctgtgcacgcagattctccctgttgccatctggtggtgagtactgggttttggatgcagccagtgtagttctgcagagtccagcaaatgaggggactctgtcctggctcataaggacatccctccgcactgctgcgggcttctccactgcgtgcttctggggcccagcctgcctgactgctcctgcctctcctgccgttgttgctggtggccagcccattgcagggctgcactgcagttgcatttcctcagttctctgttgacacaaacggacagatgacacagtgtgagcagctggcaggagagtgagagagaggcaggcaatgttcacagctcacaaaagctaaattacagacacttatgctgcagcaccctagctatcatcatgcaaacacagaacatttgattggaaaggatcctagaaaataccgaattcattggtctcaatttaggaaatggaagcacagagaagtgaagtgatttgcccaagtttgcacagcaggctggtggcaaggtggaatgagaatctgccctcttagtgccccattcgatgtatttttgttctttctgaatgaagagatctcttcagcatttattgtaaggtgggtttggtggtgatgaattctctcagcttttgttcgtctgggaaagaatttatctcttctttgtatttgaagggtagctttgctggatacagtattcttgggtgacagattttttttttttttcctttcaagactccgaaagtatcatcccattttctcctggtctgtatgttttccattgagatgtctgttgacaaacaaattggagctcctttagatgttatttgcttcctttggggtcttctctttgcccttgagctttgacagtttaattattaaaagcctgaggtggtcatatttgggttgaatctggtgttctctgactttcccgaatctggttatctatacctttctcaagtttcagaaagttttctgttactgtttctttgagtaagyttggtacctcttgttctcactcagctccctcttgaacaccartaattcttggatttggtgttttgaggtaattttctctatcttgtaggttgtctttcattctttgttctttttcctcctctgattgtgtatttgagctcactgattctttcctctgcttaagccactctgctgttgggagcttgtcatgaatttcctcatttcgctaaatgtatttttgtttcaagacttctgtctgatttttaaaaattatttcaatcttgttgttaactttctgaattgatttcctggtgttatcttggggatcaccgagtttccttagggctgccattttgatttcttgatgagagctcacaaatcgccactttgttgggccagtcactggttcttggctttgtccgtttggggaggccatggtcccgtctgctgctttctggtttgttgatgtgtgtctgtgtcttggcactgaacggttatttatttatctcttctctgtctgggtgttttggtttttctggggtatgtttgcttaaagattctttgtgatttacctgtggagtgttttcttgctaggttgcagcctcctttttggcactagatggcgccttaagcccaggttcaactcagctctggtcactgatgaaagtgctgcctgtcccaaagcagatgtcccaaaggggatgtcctgataacgtgggaaggctgggaggggacctgggagcacaggccctgcagcgtggggctgcgagtggccactctgattgagtgcctcctttggccgagttgcagagcagagtttccagggctggggacagtagccccacccccacctttgtctctggccatcctcagggctgtttctcccttcaggcactcaggatgctccccatgggttgaggcagggagaggtctcctgccagggcacccaagagcagggcaagctgttgttatctcacctttctaagtgtagaaactgtgtcaagggaaaatcttttgtgtactggatgccaggcaggttatggggaggggccttgcagatgtgggggtctggttctcctgctgtctgtctgttcggggtttttctgttcctggtggccccaggacctgactcatcctcacctctgggttctcagatgttgctggtgaccatctcagcatctcagcactgcatgtttgctttcaggtttctgctggggtggtgagacagcttgctcctgtcctgccgtttggaaccagaaaccccatttcaattgctgttttctcattgtcctttaatagaactcagaagacagcagatggttttaggtgtgtatgacaagtgtggtcttaggcaaatgtaaagtaagctttcagccataacttcaacattgtgcttagcaagtgaatgtccactcatagttttaggacttgtttacatgagtcctggattttataaagccccgagtgatgtgtcatcttttgactctgaccttaacttctattgtgttgttttctattaaggaaaacagtgggatgctagagtgccccatcagggccaagagtgaggaccacatctgcatcgtggtattggatgatgtggtgtgaggcagggggtgctcccagtgggcagcacggctgtggaggacctcagttttcttatttgtaaaatgaagggtcctgagtgaaatacatgctgctgttctcttcaacttctgataaaaatcttgattattctaaatactaacagggtgtgatctgttggcctgctgttaggagacccggaataggagcgagtgtctggcctattggcccagggtggcctgwmtgtaactgggtggcctggygcaggccctggtgcggcraaagcagctgccatgttccagaaacagagtaacaggcagagagagccaggcagctgcagctcagaaaggttaatgtctccattcgaaaaatctatctctgctctcacctgaaacatttagattgaagggattgaaagctatatttggtaattctaagagagagttttctttgcagggaagggctaagagctttgaggctcaggtgtgattcgtttttgtcaatcaatattgtactcaggattaccaataccagcctaccccaattacgcctctctgaaatgtgtggggcccagagccttctattcctagctgcacgatgcttctgctgcctgacctcaccttcagggggcaataagaagtttaatccagccacgaatcggctgcagcacgggaggggcctgacccacctcagggtccaggcatcatcacaggagggtgaagcagccattctaatgcacttctggaaaatgcctatcgaagctgatccttgggtcctgctgtgtgcttgtgtaagtttgctccagagtagctggccagggaggggagtggtcaggaggggagcggacaggaggggagcggtcaggagggtagctggcagggaggggagcagtcaagaggggagcagacaggaggggagtggacaggaggggagcagtcaggaggggagcggacaggaggggagcggacaggaggggagcagtcaggaggggagcagtcaggaggggagcggacaggaggggagcggtcaggaggggagcagtcaggaggggagcggacaggaggggagcggacaggaggggagcggtcaggaggggagcggacaggaggggagcggacaggaggggagcggtcaggaggggagcggacaggaggggagcggtcaggaggggagcggacaggaggggagcggacaggaggggagcggtcaggaggggagcggacaggtaggggagcggacaggaggggagcggacaggaggggagcggacaggaggggagcggtcaggaggggagcggacaggaggggagcggacaggaggggagctgggctgggagtgggtggtcagaaaggtgcactttcttctcagtacttcctgttctgctacctttgtagtaaccagctcttctgatggccagagttcaagcccccctgaatgaaaatgatatctgtcactcagaaggctcctcccgtggggccgtgactggctgtggactggcccggctgcctgcatgccagggcaggtgttcacatggagttgttgagttgcactctcttgcccttgagaaggatgaggcgttaataaggtcattccttctgycatttcactcgtaggtaaccatgtttcgtgtagtaagaaacgcggggctaaagtgcccgtaatgttttagcattctttaaaaggccacttactttcacaaatgggagttttgagtgactgtgtcggctgctgtgtgagcaacgaaggaaagcaggtacagtgtacgagtcgccccagacagctgcaggcctgcagggagccctgggcttagactgtgcccaacaattaggaacccaaaagggactcagggatggggcccaactgagggtggctcatggggtgcagtaggagggagctggggaatagtgtgcagtggccaatggtgccagcgggtgagtccccctcctggaccctccttctgaaggggcagaacccctgggggtgggtggaggtggtagcacgagttcctcctgcacctcacccgtgccctcgaggtggcgagagatgccgtcggtgaggtccttctgcctcccgcataacagtttgatgctgacacatcaacacagcattccccaaagcagcttttcatttcgtaatgggataactgtgggctctggaagaggctcaggtgtgccrttgttctctgcagggatttccaggcagttgacggaactggcacctgaatgggccacaggtgtgccgggtgggatttggaaacgctgggggagagaatgagctttggtaaacagcagacaaattgatttgtattccaacatttttttcccttttggaaaatcagggttttttctgcctttggcattttgttgatagcctagaatccagctacttgctccttctgtgtctgtttcctcatctgaactgtgaggctgggtgaggtgaggcgaggcactggcctggccggtgatgagcgactgatccactgggcgtggatccagtggccggcaggaggcaggggctctcctgtccctagggcaccttaggcagcagctctggcaccttccttcctgcacagcctggctcacaggcagccctgagatccaatggggtgatggggacaaatgtgttatgggactctaagtcactatttgtctccagctccctcacccccaggagtttcaaaatcattgaagacaaaattgacrggcagattctgggtgcagacggcagtcagacaccagaagcaggcccrcagtcagcatcttctgagcagcctctccatccttctgaggtttcattccaacctccctgcacttcctgggtgaagcaggtaccctgtacatgtttcctgggaacacggcaaccagccagtcctgcccctgcttgggaaagagccgcctgtttcagtggagtttgttcctgccagagggagcggagatggaagtgccggctgatgttgagcatctctcctcgggcagcaactcttagggcctcagggtcaatgctcaatggagcctccatctgtggggcttttgagtaacaatcaggtgaacatgccagggccttctttttacccatgtcttggtacagatcccatacatcttggtgcagccattctgtttgaggatgttttaggggagacacaggatgctgcaatccactttactgagcaccttttgccggaaggaatccgtgctgtatcctgtgacctagtctgcaaaggggarcacgtgagcgctagtaacgcccttgttcttggacatcaggaagggggtgggcctcatgtggccyggggggccctcagggaccacccagggagcacagtgacgtgggccatcctcagcactgccctcaggggccacccaggggtgcagtgatgtgggccaccctcagcactgccctcagggaccacccaggggtgcagtgacgtgggccaccctcagcactgccctcagggaccacccagggagcacagtgacgtgggccatcctcagcactgccctcaggggccacccaggggtgcagtgacgtgggccaccctcagcactgccctcaggggccacccaggggtgcagtgacgtgggccaccctcagcactgccctcagggaccacccaggggtgcagtgacgtgggccaccctcagcactgccctcagggaccacccaggggtgcagtgacgtgggccaccctcagcactgccctcagggaccacccaggggtgcagtgacgtgggccaccctcagcactgccctcagggaccacccaggggtgcagtgacgtgggccaccctcagcagtgccctcagggaccacccaggggtgcagtgacgtgggccaccctcagcactgcctcctcctgagggagggtaatgatggaatctgtccaggaggctccaggatggggatggaatgagtgagtggggattagcatcccagaactgttcaccttgttggggcaggagacacagtgacggtctctttgagaagtcctgtgctgtggtggttaggattcgggcctgtggccatcaccatacctcacaactgagcatgaaaactctgtgagggagggaaggacctcaggtgttgggggcctggcccagctcagcactcaggactgcaagtgacagaagccaacacagactcacgtggggcatactggactgtgaatggggaccccagggtggctctggggctgtgaatggcgaccccagggtggctctggggctgtgaatggggaccccaggktggctctggggctgtgaatggggaccccagggtggctctggggctgtgaatggagaccccagggtggctctggggctgtgaatggggaccccagggtggctctggggctgtgaatggggaccccagggtggctctggggctgtgaatggggaccccaggttggctctggggctgtgaatggggaacccagggtggctctggggctgtgaatggggaccccagggtggctctggggctgtgaatggggaccccagggtggctctggggctgtgaatggggaacccagggtggctctggggctgtgaatggggaccccagggtggctctggggctgtgaatggagaccccagggtggctctggggctgtgaatggggaccccagggtggctctggggctgtgaatggggaccccagggtggctctggggctgtgaatggggaccccaggttggctctggggctgtgaatggggaacccagggtggctctggggctgtgaatggggaccccagggtggctctggggctgtgaatggggaccccagggtggctctggggctgtgaatggggaacccagggtggctctggggctgtgaatggcgaacccagggtggctctggcacagtggccgggatctgcagcatctccccgctgcttttgtctccagtttctctctctttgtgtggtgttgggatggctgcttgtccacctgttcactcctgttcacagggcttagcaaccaatctgcatgaaaagagagaatcttccaccagagaaaagcatgtaggagggggccgtggtttggaatgggtcagggcctgcacctgaccagtgactgggcagggaatgagatgttcttgtggctcctgggctgcaagggagcaagtttagggattgacagccatcctaggataccacaacagcagagggggcacccccaggaatgcaaggcccttgacaagcaaatgccacaacctccatggttcactcaagaaggtgagtgctgccactaaaaaaatgtgtgactgcaatagataggaattaatttaacccagacggtgagacctgtacactgaaaactatgagatggtgaaagaaatggaagacaaggcaaataaatagaaggtatcccatgttcattgattgaaagaatattgttaaaatgtccgtactacctagagcaatctatagtttcagtgcaacccctatcaaaattccaatggcattttttttacagaaatagaaaagcaatcctaaaattcatatggaaccacataaaaccctgaatagccaaggcaatcaggagccaaaggaacaaagctggatgcatcacaccacctgatttcaaaatatactatgaaactataataaccaaaacaacgtggtactggcaacaacaaaacaaaatagacacatcaactaatggaacagaatagagagccagraaatgaatccatgcatttatgctcaattcattttcagcaaaagtggcaagaacacataatgggaaaaggacagtgtcttcaataaatggtgccagaaaaactggatatccacatgcagaagaatgaaattagaacttatctctcaccatatacaaaaactcaaaagggattaaagacttaaatttaagacctgaaactgtaaaactactagaagaaatcacagggcaaaatgacataacattatcctgggcaacaatttttttgatttgatccccaaagcacaggcaacaaaatcaaaaataaacaaatgggattatatcaaatacaaagctctacacagcaaacaaaacagttagcagagtgcacagacaacctaaggatkgggagaaaatatttgcaagctgtacatccaataagggcttaatatccaaaatatataataagctcaaacaactcaatagcatgaaaatgaaaaacccaattaaaagacaggtaaagaatctgagtagatatttctcaaaagaagacataaaaatggccaacatgtatgtgaaaagatgctcaactgtgctaatcattagggaaatgcaaatcaaaaccacaatgggatatcatatcacacctgttagaatggctattattaaaaagacagcaagtgttggtgaggaagtggtgaaaagggaaatcttgtgcactattgggaatctaaatcggtacagtcattatggagaactgtatggaggcctctcaaacaacaaactaccatatcatctagcaatcccactatgaggtatttatccaaaggaagtaaaatcagcatgttgaagagagatctgcaccctcatgtttactgcagcactgtccacaatggccatgacatagaatcaacstaaatgtccatcgacagatggatggataaagacacagtgggatactattcagtcttaaaaaggaaggaattctgtgatttccagcatcatggatggaattggaaagcattacgctgagtgaaataagccaggcacagaaagacaaataccgcatgatcttactcatatgtggaactgaaaacaattgaactcacagtagcagagagtagaactgaggtcgccagaggccaggggtggagggaatggggagataacaggtggagggcacaaatctcaggggcaattttttgagttcgattgtacagtgtgatgaagataatagtagacggttatacatctcaaaactgctgagagaacaaattccaaatgtttttgccacaaaaatgttaagtatttgaagtgatggatatgttaactagcttgatttaattattccacattgtattcataaatcatagcattgccttgtacccattgatatggtttggctctgtgtccccacccacatctcaccttgagttgtaatccccagcrttggggagggacctggtgggaggtgactggatcatgcgggtggtttccaccacgctgttctcgtgatagtgagggagttctcatgagagctgatggtttaaaagtgtagcactccccccacccccactccttctgccgcctcaggaagaaggtgcttgcttctccttcgccttttgccatgactagtttcttgaggcctccccagccctgtggaactgtgagtcaattaaatctcttttcttcaaaaattacttagtcttgggtagttctttatagctgtgtgaaaatggacacccatatatatatacaattgtaaattataaaatgtgtgtgaccaagtcattttgcttcctcagcctcagtttccccacctgggatgagtggacggcattggaaagctctgggtgaccactgctgccacaccagctttggccccagcttgtagcttcaggaggtttttccacgggggtggaagaccctgtctccttctacctggggcttccaaaaccggtggcctttgtctttgttctttctcttgctccaccctgctcaaaaatacaagtcctcctgagcctccgaagcttactcttcataaaaccctctgtggcctcctataagaacacgctgtctccagacaaagctctggttaccagagtagcccacaaaaaacccaaattaagacaaaacccaaagtaagacaaaaaacctgtcttcccgttggccaggagacaggcagttaggttttctctccttgttaaygtctagtcactcagatgacttctttagtttcaaggctctgctgggaggggtgtttatgccatcatagttgagcagacataggcctagaccatcagtcacgtggactgtgggggtcctgccaggactgctcccaggcagcagggtccaccctcagagatggagcactggggcccaacattttatcctccagaatttctcccgcccactgcggtcccaggtgtccgcaccatactttccctccatggcctaactgaggccttgggtccaagctgtcttctgcctaaagctctgttttgggtatcgtccatcagcttctgggttctcacctcacagggctgacaggacatgtgcaaaccaacaggraagcagtgatttccagggaaacagatgcacaagctggtgcctgatttctcatcagaggagtgccagggtcccctgggcccctctcctaaacccaccgatgaaaggtgctggggtctgttcctgcacattgcaaatygtgcaccgtcagagcgtcatttctgtcaggactgagcttggggagagcgaccacctccagcaacacagcctcacttgttctttcttggtgggttacgtgtgggacctctttgatttttacatctcactcattcttgggctagaaaagtctggttttccacgttttatgcgattccagattcctgtgtggcatttcagcccagactccagggtgtcttgtattaaatgccggcgagtataattagcattcaagacctgggtgcaaggcgttgcaagtgttaatttaacaggaaattatgtgtcttcagtttggtcgaggagctgcctcttctggaggcctaaacttgaaacagcctcccttgcctgcgactggggccaatgctccccactggacggagctcctgatgatggctcagccccatcccatattgcttctagttactaaacwgccttgttcctgctgaagacagctcttcccgagcctggtctggctggtggcttcttggggcctgtgtrgggttgctggagcttcccccgtctgtgctgtcctgggtatctcttgggtgaggccctgcgctttgctgctcgttgtcacggcttctaagggcccaggtgctggctcctcggcagggggacattttgtgtttttggaaggtgctggggtctgacactctcgtatgggggtctgggtggcatgtaagaggggctgtctttccctgaatgtgagtttctgggtcttatcttggggtgtggcagtgtgaagtgtatgttcattggtgtgttcactggtcttctttgggagctgaatttaaactcatcctggtgcctggaaatgcagtctagaccctccatggaagcctttacctgagctcgattgtagctgtgattccactgggagcagccgcgacagcccacgtgccacgagcatggctgcctgagcctctgcgcgagccctgcttgcaggtgttgggtgtaaaatcagaaagggggctgattccaccgggagcagccgcgacagcccacgtgccacgagcatggctgcctgagcctctgcgcgagctctgcttgcagttgttgggtgtaaaatcagaaatggggctgattccaccgggagcagccgcgacagcccatgtgccaccagcatggctgcctgagcctctgcgcgagccctgcttgcaggtattggggtgtaaaatnnnnnnnnnnnnnnnnnnnnnnnnnnnnnnnnnnnnnnnnnnnnnnnnnnnnnnnnnnnnnnnnnnnnnnnnnnnnnnnnnnnnnnnnnnnnnnnnnnnnnnnnnnnnnnnnnnnnnnnnnnnnnnnnnnnnnnnnnnnnnnnnnnnnnnnnnnnnnnnnnnnnnnnnnnnnnnnnnnnnnnnnnnnnnnnnnnnnnnnnnnnnnnnnnnnnnnnnnnnnnnnnnnnnnnnnnnnnnnnnnnnnnnnnnnnnnnnnnnnnnnnnnnnnnnnnnnnnnnnnnnnnnnnnnnnnnnnnnnnnnnnnnnnnnnnnnnnnnnnnnnnnnnnnnnnnnnnnnnnnnnnnnnnnnnnnnnnnnnnnnnnnnnnnnnnnnnnnnnnnnnnnnnnnnnnnnnnnnnnnnnnnnnnnnnnnnnnnnnnnnnnnnnnnnnnnnnnnnnnnnnnnnnnnnnnnnnnnnnnnnnnnnnnnnnnnnnnnnnnnnnnnnnnnnnnnnnnnnnnnnnnnnnnnnnnnnnnnnnnnnnnnnnnnnnnnnnnnnnnnnnnnnnnnnnnnnnnnnnnnnnnnnnnnnnnnnnnnnnnnnnnnnnnnnnnnnnnnnnnnnnnnnnnnnnnnnnnnnnnnnnnnnnnnnnnnnnnnnnnnnnnnnnnnnnnnnnnnnnnnnnnnnnnnnnnnnnnnnnnnnnnnnnnnnnnnnnnnnnnnnnnnnnnnnnnnnnnnnnnnnnnnnnnnnnnnnnnnnnnnnnnnnnnnnnnnnnnnnnnnnnnnnnnnnnnnnnnnnnnnnnnnnnnnnnnnnnnnnnnnnnnnnnnnnnnnnnnnnnnnnnnnnnnnnnnnnnnnnnnnnnnnnnnnnnnnnnnnnnnnnnnnnnnnnnnnnnnnnnnnnnnnnnnnnnnnnnnnnnnnnnnnnnnnnnnnnnnnnnnnnnnnnnnnnnnnnnnnnnnnnnnnnnnnnnnnnnnnnnnnnnnnnnnnnnnnnnnnnnnnnnnnnnnnnnnnnnnnnnnnnnnnnnnnnnnnnnnnnnnnnnnnnnnnnnnnnnnnnnnnnnnnnnnnnnnnnnnnnnnnnnnnnnnnnnnnnnnnnnnnnnnnnnnnnnnnnnnnnnnnnnnnnnnnnnnnnnnnnnnnnnnnnnnnnnnnnnnnnnnnnnnnnnnnnnnnnnnnnnnnnnnnnnnnnnnnnnnnnnnnnnnnnnnnnnnnnnnnnnnnnnnnnnnnnnnnnnnnnnnnnnnnnnnnnnnnnnnnnnnnnnnnnnnnnnnnnnnnnnnnnnnnnnnnnnnnnnnnnnnnnnnnnnnnnnnnnnnnnnnnnnnnnnnnnnnnnnnnnnnnnnnnnnnnnnnnnnnnnnnnnnnnnnnnnnnnnnnnnnnnnnnnnnnnnnnnnnnnnnnnnnnnnnnnnnnnnnnnnnnnnnnnnnnnnnnnnnnnnnnnnnnnnnnnnnnnnnnnnnnnnnnnnnnnnnnnnnnnnnnnnnnnnnnnnnnnnnnnnnnnnnnnnnnnnnnnnnnnnnnnnnnnnnnnnnnnnnnnnnnnnnnnnnnnnnnnnnnnnnnnnnnnnnnnnnnnnnnnnnnnnnnnnnnnnnnnnnnnnnnnnnnnnnnnnnnnnnnnnnnnnnnnnnnnnnnnnnnnnnnnnnnnnnnnnnnnnnnnnnnnnnnnnnnnnnnnnnnnnnnnnnnnnnnnnnnnnnnnnnnnnnnnnnnnnnnnnnnnnnnnnnnnnnnnnnnnnnnnnnnnnnnnnnnnnnnnnnnnnnnnnnnnnnnnnnnnnnnnnnnnnnnnnnnnnnnnnnnnnnnnnnnnnnnnnnnnnnnnnnnnnnnnnnnnnnnnnnnnnnnnnnnnnnnnnnnnnnnnnnnnnnnnnnnnnnnnnnnnnnnnnnnnnnnnnnnnnnnnnnnnnnnnnnnnnnnnnnnnnnnnnnnnnnnnnnnnnnnnnnnnnnnnnnnnnnnnnnnnnnnnnnnnnnnnnnnnnnnnnnnnnnnnnnnnnnnnnnnnnnnnnnnnnnnnnnnnnnnnnnnnnnnnnnnnnnnnnnnnnnnnnnnnnnnnnnnnnnnnnnnnnnnnnnnnnnnnnnnnnnnnnnnnnnnnnnnnnnnnnnnnnnnnnnnnnnnnnnnnnnnnnnnnnnnnnnnnnnnnnnnnnnnnnnnnnnnnnnnnnnnnnnnnnnnnnnnnnnnnnnnnnnnnnnnnnnnnnnnnnnnnnnnnnnnnnnnnnnnnnnnnnnnnnnnnnnnnnnnnnnnnnnnnnnnnnnnnnnnnnnnnnnnnnnnnnnnnnnnnnnnnnnnnnnnnnnnnnnnnnnnnnnnnnnnnnnnnnnnnnnnnnnnnnnnnnnnnnnnnnnnnnnnnnnnnnnnnnnnnnnnnnnnnnnnnnnnnnnnnnnnnnnnnnnnnnnnnnnnnnnnnnnnnnnnnnnnnnnnnnnnnnnnnnnnnnnnnnnnnnnnnnnnnnnnnnnnnnnnnnnnnnnnnnnnnnnnnnnnnnnnnnnnnnnnnnnnnnnnnnnnnnnnnnnnnnnnnnnnnnnnnnnnnnnnnnnnnnnnnnnnnnnnnnnnnnnnnnnnnnnnnnnnnnnnnnnnnnnnnnnnnnnnnnnnnnnnnnnnnnnnnnnnnnnnnnnnnnnnnnnnnnnnnnnnnnnnnnnnnnnnnnnnnnnnnnnnnnnnnnnnnnnnnnnnnnnnnnnnnnnnnnnnnnnnnnnnnnnnnnnnnnnnnnnnnnnnnnnnnnnnnnnnnnnnnnnnnnnnnnnnnnnnnnnnnnnnnnnnnnnnnnnnnnnnnnnnnnnnnnnnnnnnnnnnnnnnnnnnnnnnnnnnnnnnnnnnnnnnnnnnnnnnnnnnnnnnnnnnnnnnnnnnnnnnnnnnnnnnnnnnnnnnnnnnnnnnnnnnnnnnnnnnnnnnnnnnnnnnnnnnnnnnnnnnnnnnnnnnnnnnnnnnnnnnnnnnnnnnnnnnnnnnnnnnnnnnnnnnnnnnnnnnnnnnnnnnnnnnnnnnnnnnnnnnnnnnnnnnnnnnnnnnnnnnnnnnnnnnnnnnnnnnnnnnnnnnnnnnnnnnnnnnnnnnnnnnnnnnnnnnnnnnnnnnnnnnnnnnnnnnnnnnnnnnnnnnnnnnnnnnnnnnnnnnnnnnnnnnnnnnnnnnnnnnnnnnnnnnnnnnnnnnnnnnnnnnnnnnnnnnnnnnnnnnnnnnnnnnnnnnnnnnnnnnnnnnnnnnnnnnnnnnnnnnnnnnnnnnnnnnnnnnnnnnnnnnnnnnnnnnnnnnnnnnnnnnnnnnnnnnnnnnnnnnnnnnnnnnnnnnnnnnnnnnnnnnnnnnnnnnnnnnnnnnnnnnnnnnnnnnnnnnnnnnnnnnnnnnnnnnnnnnnnnnnnnnnnnnnnnnnnnnnnnnnnnnnnnnnnnnnnnnnnnnnnnnnnnnnnnnnnnnnnnnnnnnnnnnnnnnnnnnnnnnnnnnnnnnnnnnnnnnnnnnnnnnnnnnnnnnnnnnnnnnnnnnnnnnnnnnnnnnnnnnnnnnnnnnnnnnnnnnnnnnnnnnnnnnnnnnnnnnnnnnnnnnnnnnnnnnnnnnnnnnnnnnnnnnnnnnnnnnnnnnnnnnnnnnnnnnnnnnnnnnnnnnnnnnnnnnnnnnnnnnnnnnnnnnnnnnnnnnnnnnnnnnnnnnnnnnnnnnnnnnnnnnnnnnnnnnnnnnnnnnnnnnnnnnnnnnnnnnnnnnnnnnnnnnnnnnnnnnnnnnnnnnnnnnnnnnnnnnnnnnnnnnnnnnnnnnnnnnnnnnnnnnnnnnnnnnnnnnnnnnnnnnnnnnnnnnnnnnnnnnnnnnnnnnnnnnnnnnnnnnnnnnnnnnnnnnnnnnnnnnnnnnnnnnnnnnnnnnnnnnnnnnnnnnnnnnnnnnnnnnnnnnnnnnnnnnnnnnnnnnnnnnnnnnnnnnnnnnnnnnnnnnnnnnnnnnnnnnnnnnnnnnnnnnnnnnnnnnnnnnnnnnnnnnnnnnnnnnnnnnnnnnnnnnnnnnnnnnnnnnnnnnnnnnnnnnnnnnnnnnnnnnnnnnnnnnnnnnnnnnnnnnnnnnnnnnnnnnnnnnnnnnnnnnnnnnnnnnnnnnnnnnnnnnnnnnnnnnnnnnnnnnnnnnnnnnnnnnnnnnnnnnnnnnnnnnnnnnnnnnnnnnnnnnnnnnnnnnnnnnnnnnnnnnnnnnnnnnnnnnnnnnnnnnnnnnnnnnnnnnnnnnnnnnnnnnnnnnnnnnnnnnnnnnnnnnnnnnnnnnnnnnnnnnnnnnnnnnnnnnnnnnnnnnnnnnnnnnnnnnnnnnnnnnnnnnnnnnnnnnnnnnnnnnnnnnnnnnnnnnnnnnnnnnnnnnnnnnnnnnnnnnnnnnnnnnnnnnnnnnnnnnnnnnnnnnnnnnnnnnnnnnnnnnnnnnnnnnnnnnnnnnnnnnnnnnnnnnnnnnnnnnnnnnnnnnnnnnnnnnnnnnnnnnnnnnnnnnnnnnnnnnnnnnnnnnnnnnnnnnnnnnnnnnnnnnnnnnnnnnnnnnnnnnnnnnnnnnnnnnnnnnnnnnnnnnnnnnnnnnnnnnnnnnnnnnnnnnnnnnnnnnnnnnnnnnnnnnnnnnnnnnnnnnnnnnnnnnnnnnnnnnnnnnnnnnnnnnnnnnnnnnnnnnnnnnnnnnnnnnnnnnnnnnnnnnnnnnnnnnnnnnnnnnnnnnnnnnnnnnnnnnnnnnnnnnnnnnnnnnnnnnnnnnnnnnnnnnnnnnnnnnnnnnnnnnnnnnnnnnnnnnnnnnnnnnnnnnnnnnnnnnnnnnnnnnnnnnnnnnnnnnnnnnnnnnnnnnnnnnnnnnnnnnnnnnnnnnnnnnnnnnnnnnnnnnnnnnnnnnnnnnnnnnnnnnnnnnnnnnnnnnnnnnnnnnnnnnnnnnnnnnnnnnnnnnnnnnnnnnnnnnnnnnnnnnnnnnnnnnnnnnnnnnnnnnnnnnnnnnnnnnnnnnnnnnnnnnnnnnnnnnnnnnnnnnnnnnnnnnnnnnnnnnnnnnnnnnnnnnnnnnnnnnnnnnnnnnnnnnnnnnnnnnnnnnnnnnnnnnnnnnnnnnnnnnnnnnnnnnnnnnnnnnnnnnnnnnnnnnnnnnnnnnnnnnnnnnnnnnnnnnnnnnnnnnnnnnnnnnnnnnnnnnnnnnnnnnnnnnnnnnnnnnnnnnnnnnnnnnnnnnnnnnnnnnnnnnnnnnnnnnnnnnnnnnnnnnnnnnnnnnnnnnnnnnnnnnnnnnnnnnnnnnnnnnnnnnnnnnnnnnnnnnnnnnnnnnnnnnnnnnnnnnnnnnnnnnnnnnnnnnnnnnnnnnnnnnnnnnnnnnnnnnnnnnnnnnnnnnnnnnnnnnnnnnnnnnnnnnnnnnnnnnnnnnnnnnnnnnnnnnnnnnnnnnnnnnnnnnnnnnnnnnnnnnnnnnnnnnnnnnnnnnnnnnnnnnnnnnnnnnnnnnnnnnnnnnnnnnnnnnnnnnnnnnnnnnnnnnnnnnnnnnnnnnnnnnnnnnnnnnnnnnnnnnnnnnnnnnnnnnnnnnnnnnnnnnnnnnnnnnnnnnnnnnnnnnnnnnnnnnnnnnnnnnnnnnnnnnnnnnnnnnnnnnnnnnnnnnnnnnnnnnnnnnnnnnnnnnnnnnnnnnnnnnnnnnnnnnnnnnnnnnnnnnnnnnnnnnnnnnnnnnnnnnnnnnnnnnnnnnnnnnnnnnnnnnnnnnnnnnnnnnnnnnnnnnnnnnnnnnnnnnnnnnnnnnnnnnnnnnnnnnnnnnnnnnnnnnnnnnnnnnnnnnnnnnnnnnnnnnnnnnnnnnnnnnnnnnnnnnnnnnnnnnnnnnnnnnnnnnnnnnnnnnnnnnnnnnnnnnnnnnnnnnnnnnnnnnnnnnnnnnnnnnnnnnnnnnnnnnnnnnnnnnnnnnnnnnnnnnnnnnnnnnnnnnnnnnnnnnnnnnnnnnnnnnnnnnnnnnnnnnnnnnnnnnnnnnnnnnnnnnnnnnnnnnnnnnnnnnnnnnnnnnnnnnnnnnnnnnnnnnnnnnnnnnnnnnnnnnnnnnnnnnnnnnnnnnnnnnnnnnnnnnnnnnnnnnnnnnnnnnnnnnnnnnnnnnnnnnnnnnnnnnnnnnnnnnnnnnnnnnnnnnnnnnnnnnnnnnnnnnnnnnnnnnnnnnnnnnnnnnnnnnnnnnnnnnnnnnnnnnnnnnnnnnnnnnnnnnnnnnnnnnnnnnnnnnnnnnnnnnnnnnnnnnnnnnnnnnnnnnnnnnnnnnnnnnnnnnnnnnnnnnnnnnnnnnnnnnnnnnnnnnnnnnnnnnnnnnnnnnnnnnnnnnnnnnnnnnnnnnnnnnnnnnnnnnnnnnnnnnnnnnnnnnnnnnnnnnnnnnnnnnnnnnnnnnnnnnnnnnnnnnnnnnnnnnnnnnnnnnnnnnnnnnnnnnnnnnnnnnnnnnnnnnnnnnnnnnnnnnnnnnnnnnnnnnnnnnnnnnnnnnnnnnnnnnnnnnnnnnnnnnnnnnnnnnnnnnnnnnnnnnnnnnnnnnnnnnnnnnnnnnnnnnnnnnnnnnnnnnnnnnnnnnnnnnnnnnnnnnnnnnnnnnnnnnnnnnnnnnnnnnnnnnnnnnnnnnnnnnnnnnnnnnnnnnnnnnnnnnnnnnnnnnnnnnnnnnnnnnnnnnnnnnnnnnnnnnnnnnnnnnnnnnnnnnnnnnnnnnnnnnnnnnnnnnnnnnnnnnnnnnnnnnnnnnnnnnnnnnnnnnnnnnnnnnnnnnnnnnnnnnnnnnnnnnnnnnnnnnnnnnnnnnnnnnnnnnnnnnnnnnnnnnnnnnnnnnnnnnnnnnnnnnnnnnnnnnnnnnnnnnnnnnnnnnnnnnnnnnnnnnnnnnnnnnnnnnnnnnnnnnnnnnnnnnnnnnnnnnnnnnnnnnnnnnnnnnnnnnnnnnnnnnnnnnnnnnnnnnnnnnnnnnnnnnnnnnnnnnnnnnnnnnnnnnnnnnnnnnnnnnnnnnnnnnnnnnnnnnnnnnnnnnnnnnnnnnnnnnnnnnnnnnnnnnnnnnnnnnnnnnnnnnnnnnnnnnnnnnnnnnnnnnnnnnnnnnnnnnnnnnnnnnnnnnnnnnnnnnnnnnnnnnnnnnnnnnnnnnnnnnnnnnnnnnnnnnnnnnnnnnnnnnnnnnnnnnnnnnnnnnnnnnnnnnnnnnnnnnnnnnnnnnnnnnnnnnnnnnnnnnnnnnnnnnnnnnnnnnnnnnnnnnnnnnnnnnnnnnnnnnnnnnnnnnnnnnnnnnnnnnnnnnnnnnnnnnnnnnnnnnnnnnnnnnnnnnnnnnnnnnnnnnnnnnnnnnnnnnnnnnnnnnnnnnnnnnnnnnnnnnnnnnnnnnnnnnnnnnnnnnnnnnnnnnnnnnnnnnnnnnnnnnnnnnnnnnnnnnnnnnnnnnnnnnnnnnnnnnnnnnnnnnnnnnnnnnnnnnnnnnnnnnnnnnnnnnnnnnnnnnnnnnnnnnnnnnnnnnnnnnnnnnnnnnnnnnnnnnnnnnnnnnnnnnnnnnnnnnnnnnnnnnnnnnnnnnnnnnnnnnnnnnnnnnnnnnnnnnnnnnnnnnnnnnnnnnnnnnnnnnnnnnnnnnnnnnnnnnnnnnnnnnnnnnnnnnnnnnnnnnnnnnnnnnnnnnnnnnnnnnnnnnnnnnnnnnnnnnnnnnnnnnnnnnnnnnnnntgacgtctgcaggcatcagctcttatggtgagagtatgggtgtgagtgtcctctgtgggcctcagctcttatggtgagagtgtgggtgtaagtgacatctgcaggtgtcaactcttatggtgagagtgtgggtgtgagtgacgtctgcaggcatcagctcttatggtgacagtgtgggtgtgagtgacgtctgcaggtgtcacttcttatggtgagagtgtgggtgtgagtgacgtctgcaggtgtcacctcttatggtaagagtatggatgtgagtgacctctttgtgcctcagctcttrtggtgagagtgtgggtgtgagtgacgtctgcaggtgtcacctcttatggtgagagtgtgggtgtgagtgacgtctgcaggtgtcagctsttatgttgagagtatgggtgtgagtgacatctgcaggtgtcacctcttatggtgagagtgtgggtgtgagtgtcctctgtgggcctcagctcttatggtgagagtgtgggtgtgagtgacgtctgcagatgtcacctcttatcgtgagagtgtgggtgtcagtgacgtctgcgggtgtcagctcttatggacagagtgtggatgtgagtgatgtctgcaggtgtcacatcttatggtgagagtgtggatgtgagtgacatctgcaggtgtcggctcttatggtgrgagtatgggtgtgagtgacctctgtrggcctcagctcttatggtgagagtgtgggtgtgagtgwcgtctgcagatgtcacctcttatcgttagagtgtgggtgtcagtgacgtttgckgttgtcagctcttatggagagagtgtggatgtgagtgacgtcttcagttgtcagctcttrtcgtgggagtgtgagtgtgagtgacrtctgcgggcgtcagctcttatggtgagagtgtgggtgtgagtgacgtctgcgggtgtcagctcttatggtgagaatctggttgttagtgtcgtctgcgggtgtcacctcttagggtgacagtgtgggtgtgagtgatgtctgtgcatgacagctcttatggtgagagtgtgagtttgagtgacgtctgcaggtgtcagctcttatggtgagaatgtgggtgttagtgacgtctgcaagtgtcacctcttatggtgagagtgtcggtgtgagtgacgtctgcaggtgtcacctcttatggtgagagtatggctgtaagtgacctctgtgggcctcagctcttatggtgagagtgtgggtgtgagtgacgtctgcgggtgtcagctcttatggtgagagtgtgggtgtgagtgatgtctgtgggtgtcagctcttatggtgagagtgttggtgtgagtgacgtctgcaggtgtcagctcttatggtgagagtgtgggtgtgagtgacgtctgcagatgtcacctcagggtgagagtgtgggtgtgagtgacgtctgcgggtgtcagctcttatggtgagagtgtgggtgtgagtgacgtctgcgggtgtcagctcttatggtgagagtgtgggtgtgagtgacgtctgcaggtgtcagctcttatggtgagagtgtgggtgtgagtgacgtctgcgggcgtcacctcttatggtgagagtgtgggtgtgagtgacgtctgcgggtgtcagctcttatggtgagagtgtgggtgtgagtgacgtctgcaggtgtcagctcttatggtgagagtgtgggtgtgagtgacgtctgcagatgtcacctcttatggtgagagtgtgggtgtgagtgtcgtctgcgggcgtgagctcttatggtgagagtcgccatacaagacctgaggattttgtgagttggttgcagaataggacactctgccagtcactccatgtagctatggtgaccgcattttctcagtcagacgctggcatctacagtctaaagtgaaagtgagtctccgtagaggacacagcctcgagcggtgaagtgggaccatgtggacagatcttgggttgcgactcccaggccaactctgagcaagttccttaacctccctgtgccttaatttccacatggcgtcaatgggataataatacgcagtgtcttagtccatgaaggctgctcaaagtaccacctattgcggggcttagaaacagcagacattgatttctcagttctgaaggctggaagccaaggtaaccgccctggcagggttgacgtctgatgtctggcgagtcccctcctggctcatcgacggtgcctcctcacgtgtcctcatgtggccggagcgtgagccgtccttgggtcctgtgtaaggaaggccccacctcctcgcctctcagccgtccgcctgctaacagcagcacccrgggctggtttcggcacacagcctgttgcatggaggaggagcctcatgggcttggggtgggggtttaaggcatccttaaaggtaaaaggctgggaagtgctgggcgcgctggtgctccgtgagggaggcatgactggctgtgttctyggcactgtcttcactgtcctcccctcctagcctgctcctcacctcccagaagggcctcccacccgccacgcttccccctgccccgcctggcyggcgtctgctgggctcctcagtactgccggctcacaccctcaagctgtggcttctgtcgtgcgcctccctcggtgcagtgggctgtgcgccgctggatttgccatcccaggcctcactgggatccctgggtggcgggaggaatggaggccccactcatagtgacttgcagatgtcactcacacccacaatctcatcataagacctgatgcttgcagacatcactcacactcacaagggaagctggcctctcctggatttaccgtcccaggcctcactgggatccctgggtggcgagaggaacagaggtcccgcttgtcgctcagggaagctgggatctcctggatttactgtcccaggcctccctgggatccctgggtggcgggggggggggaatggaggccccgctcctagtgacttgcagatgtcactgacacccacactctcaccataagacctgacacctgcagacgtcactcacactcacaagggaagctggcctctcctggatataccatcccaggcctcactgggatctgggtggtgggaggaatgggggccctgctcctcacacaagggaagctggcctctccggacagtgaggctcccgctgtgggtgcaggtgctgcccggacgtggggctcctccccagtcagagcctcacgctgctctgcagatgcataggctgtgctggccgctcccaggcactgtcactctgtcccctgccttctgctgcctgtcagtggctgctctgaactgtaacgaaatccttgaaaataaaggaatttccagcgatatagggtctcggcttatcttcaggtttcattacgaactaagctgctcagacttcacagcagtcctgccttggacgcagcccacggatccaacggctccttaaatctgacctgggtgtgtggtgagccagtgcctgcttccttgggcctcagaagccattgctgtctctcaggattcacctttggcctcctggaatttttgcagcagttatgactggatgccatgacagcagtttctactccctgagaatgggagcacttttacagcttccttgcagaatgggagcacttttacagcttccttgcagaaatgtgcatggcaggtgcttgatcagttcagataaagggctttttctccctctggagaattcctttcaacagggcagtgattctgagctgtaattacttttccctcctccaaaaatagctggggagatttttttcttgttgctgcacccctggggaccctgatggagcagtgggctcctccgtctgtggtgctgctttgagaagccccatgggaccgagggaaccctggcaacgctgccagctccctgcagggaggggacttcagaggcagctccagtgtcccagggcaccgggatttacagattgaaggtactttggcaaggcagcctccaccaggagggggcagtgggagagaggcagggtcctgagggaccccagcaggggaggcaggaaagaatgaaagggtgacctagcctggtacagcaggacacctggagcatggcggtcccaggctggtgagggctccttctgctattctgagtgtgagtagtgagtgtgtacatgagaacatgtacatgtgtgagcatgtgagaacagatagtgtgtacatgtgcatgtgtgtgagaatgttcatgtgtgtgagaacttgtgcatgtgagaatgtatgtgtgagaacgtgtacatgtgtgagcaggtgtgtgcatgtgagaatgtgtgtgagaacgtgtacatgtgtgagcatgtgtgagcatgtgtgtgcatgtgataatgtgtgtgtgagaatgtgtacatgtgtgagcatgtgtgagcacgtgtgtgcatgtgagaatgtgtatgtgtgagaatgtgtacatgtgtgagcatgtgtgagcacgtgtgtrcatgtgagaatgtgtgcatgtatgtggatatgagaatgtttacgtgtgtgtttgagaatgtgtgcatgtgtgagaatgtgagcaygtgtgtgtgcatgtgagaatgtgtgcacgtgtggatatgagtgtgtatgtgtgtgcttgtgtgagaatgtgcatgggtgagaatgagtgcatgtgagaatgtgtgcatgtatgtgcagatgagaatgtgtacatgtgcatgtgtgagaatgtgtatwtatgtgagaatgcatgtgtgtgcatctgagaatgtgtatgtgcgtgtgaatgtgtgcgtgtgtgcatgtgtgagaatgtgtatgtgtgyatgtgagaacgtgtgagcatgtgcatgtgtgagaatgtgtgcatgtgtgagaacrtgtgcatgcgagaatgagcatgtgtgtgagaatgtatgcatgtgagagcatgtgtgaggatgtgtgcatgtgtgagaatgtgcatgtgtgtgcatgtgagtgtgtgagcatgtgtgaaacgtgcatgtgagaatgtgcatgtgagaatgtatgcatgtgagagcatgtgtgaggatgtgtgcatgtgtgagaatgtgcatgtgtgtgcatgtgagagtgtgtgagcatgtgtgaaaacgtgtgcatgtgagaatgtgcatgtgtgtgagaacgtgtgcctgtgagagcatgtgtgaggaygtgtatgtgagaatgtgcatgcattatgtggttgtgtgtctgcatatgtgcatgtgtctgcatacattgtgtgtgcatgctgtgaatgtctgtgtacgtggttgcttgtgtattgtgcacacgtgtacaagtgtgcattaattctcctgctgtactgggcagcagtgtctcgtctcctggcccctcacactggccgactgagtctgccactggcatcttcaggcctgagccagagcagggctcctgagcgatgtctcggatgaagaactggcactgcagggaggcagccacgaggggtcactggtgctgcttggtgctcactggccacctgggtgaccgcagcctctgggccttgccttgtttggatgcagggagggagtgagtgacagaccagcttgaagaagcacagcagggtgccattgtttcatgagaggcggctgtgctccctccctggctgccagactcaagacctgcggcgggtatggcctgtggggccctggatgtggtcccattctctctggaaagtgcgccctgagccctgcaacgttgctgtttctagkctctgggttcagtgcctgggacacccccaggaggccgcgttcccctcctgggcttcccaggtgtgttcccagggagctgctgtgagactgactgcccgttccttttgtctgggcagggtcagctggcagccgcaagagcggatgcatttggtgtttactgtagacagtattctgcaaacctgagtgtctgtctcagcgatggctttgtgacgattctagaaatggtcgcagtccctgcccagccctggaacgtgctagtgcttgctccgccrgggctctgcctgcccggtggtttgccgggtgtctctcgcctgcccttcttgtcggaatacagcctcccacgcctctcatctgcaaaggcttcgtaattggggtgccttttctgcccatcccttcttgctcacaattcaagaactttgttctgatagtttccaggcagctgagataaatcagttttcacgtgcataccatttaccttaatatgctgtttacacaaatgattgaataggtaygcgcattgtggttatttcaaacaatgccctaagctaattgcctcactttgaaatactaaattaagtgatcatattgtattcattaattcccaagtcctgttatatttccataaataaataagaaatgttaaaaaaaaaaagacataagtaaaagtaggtaaagatattagaaaaaggggaaaagcagatggttagttcactggaatctgtgccacaggcgcctgtaagcaggaggygtccctgcccaggagctggtcgtgytcacggcgtttggtggaaggaagatgctcctggctgggggaccccctgtggatctctgtggagattgtggggcctgggggaccccctgtggatctctgtggagaattgtggggactggaggaccccctgtggatctctggggagaattgtggggcctgggggaccccctgtggatctctgtggwtaattgtggggactgggggaccccctgtggatctctgtggagaattgtggggtaacgcagtgagtgacgtttctcagcagatgcacagttagcgtctctgggccatttctcctaggatatcctctagggcaggcctggacgtgtcactcgggatgtygtttagtgcaggcctgggcrtatcacctaagcaaagtgtggcaagagcactttcctcacggggtatcaaagccaccttgttcggtccacagctttccggtgctccaattggatggttctgggtcagtgctatgggtgtcacagagagtggaggctcagtatctccaagcaacaggaccctctggggcaccctgggcagcagagccccacccttactctgaagaacagaggtccactaggatcacctgcttcacttatggagctggggatagaaatgctgggggtcaatcggccctctgagcccaagcagagagacagtacgggacggggtggaggcgcatggccacckgagaacttgcgagactcatgccagcccctcctagggcgcccccaccaccacctttttggtccccagtgagtctttcatccaagtgggtcactgccaggggtgaggacttgtaaatctatgtgagatttcaacaaatgaggcttctagctgatggtcttaaacacttccacggacatctccattttcttttagacaaawgggaaaataccagttatagtcattcactaacatccttttagtccacaccgggggcaaggcactgtaccagatgctgtgggggcgtgaagaggctgtagctgtgatccctgccttccaggaactcacggtgtcaccrgggagagggtggtcctgcagggcggtagaggcgaggtgccgtcttgtccatgcggagactgtgtgtgagcgtacgcgtgtgggcgtgtgagtttgtgcatgtgcgcttgtgtgcacctgtatatgagttagtgtgtctgggtgtgtgtgtgtgtgtgcacgtttgcaaatgtgtgagtgtgtacgtgctcctgtgtgtgtgtctgcataatcaagtgcatgcaaatgagtgtgtgcacacttgtgtgtgtgtacatgtgttggaatgttcacgtgggtgcrtgtgagtgtgtgtatgtgtgagtgtcccgtgcatgggagaagtgtgtgaaaatgtgtgtgttggttcatgcaggtatgaatgtgcatacatgcaccgtgtacacacgtgtggtgtaaggttggagggaggtatgcagccccacagactatatgagaatagaagtgggctggaagcttggtcctggaggaggcctgtgtttgtgttttggggacagtgacgcttgcgaatgaaattactttggcctgtgggaacagtgctctaaggaccactrtttaaaacaaattaccaagataaatgagctctttttcttatttctccaaaaatccaaccacagaaaatgctcaatattttctttcaaatgaaagaaactgaccacccaattctagattactgttaataaaagtgtctctaagcaaaccttttgctcctcaaagcttttgtgtccattgtcctgggccctgttcatccgctgctctgcatcctgggcattccttctctcactgtctttagcactgtccattccggtcccagaggcagtggggtccagccttctgtctgcacagtgaaggggttgcgtcctagaactctgaaatgtggggccccctggttcactgagtccctgagatyggagttctgtggggtccagccttctgtctgcacagtgaagggggttgcatcccagaactctgggggtgtgaggccccccagttcgttgagtccctgatatcggagttccaggccaggcagaattcttgtcgggggacgcctgccatgtctcgcctctcccagccagggcagcaagaagcctgccttccttcctgttttggaaaaagactcattctacagaacgtctcccagaatattcccctcccccacaagcctgtctgtgcatgggctgggtagcatgtggaaaggcctggttgctgctgccggcagagggatgtgtgttgtcctaaggttcaccttgcagatggctccagtctatccaggtctctggtctccatgaccaccatcctcacttagccaccatcccctggttggggctgctctgtttacccgccatgggctcctggcaatctccagcccttgccagggagatctgttttaaaacgcagacccattcaagagcctgccctgcctggaacaccacccaagtggaggtggcctcctctagctcctgggatgaaggccactgcctctgattcctgcaggctctgcacaatctgcttgagtggcttgaccagcttggtgtcctctcctgcctgatccagaactgcaaggccttgtcyccactgcccactggggctgaccagggccaggtgctgccatgcacggagctgctccctcccggccgcccaccagggccaggtgctgccatgcacggagctgctccctccccgttgcccactggggccaggtgctgccatgcacggagctgctccctcctggccgcccacyggggccaggtgttgccatgcacggaactgctccctccccgtcgcccaccggggctggatgctgccatgcacggagctgctcccttagcctggagtgtcctcgatgtcctcaggtcggccgctgttcgttctctgaccrctgggtgaggtcrgtgccctctgtcaggygctctcgtgcccttttttgcagcctgtccacaattataaccgaaccatcagtggtgaacatctgttgccccaggatcctggaagctctggagcatggagcctgcagtgtctgctttttctgtgtgcgtgtctcccggctgtcctggcctggccatgcaagcaggatgcagggcagagctgtggcttccctgggacgagggtgtggggcggaggcagccaagcagcaggcatagcactgacctgctcccagaacaggaaggggctttgcaaggctcaggcaatgctggggacagagatgatgagcctygttgatgagagcacccaacgctgcagggaagacagagggagaaggcacgaagccgtcatcgaggagcacctgggggttaggcttccgcgcagaggcacgggcagtgtctgtttgccggaasggtttatgatgttggattggcggcatccttgggcaygcacagtaagtttggcagttaaacacgttagcggctgtgcttatgtgcrtgtatgagttagcagctgtgcacgtgtttctgtataaggattgacaygtacacatatatttgcacacgagtgttttgatggtgacagtagccaaggacgggtggacagggagcccacagttttcataggcaaacctgttctcatctcccatgattttcagacagcccccaatttgaactcagttgccagcaatgagacttggaattaaggttgcgcatggaatgcccgttctggacgaagagcaggaccctggttctgaaagtctcgtggatgggctccatcacccaaggcctcctgcctccactgcggtgcggtgatgcacttccagctgggagctcagcatggcccgcagggctgcagagctggacgggtcagtccgggcttcgaygatagggtcatgtcgacaggctgcagggccatggcayrggaaacagagtccgaagtagaagagagttcatgaggaaaccccaagcaagctcagatcccaggtggggtcctggccgtgtcccaagaacacgaaggcaggagtcccgcagaggaggggcctgagggttacgggctctgggtrgtttctagggtgattaaatggtcggcggtgaggcgacttcagtgtgccacttcccgggattgtttcagaggccgcactgcacatctgagatggtggagctcagcctggactggtgggagctttggttctctggctccggcacccctgctgtgtagatcacccctggcgtcccgactccggagtctcatcgcacctgatgctttcctgattgagatttgactttccagtccttttctctagtatgttcatagagaccttttggggtcctgcctattagccaagtgacccggaagaacaaagcaatagtttcaaaattctggccacataaaaatcaattctaccagatgtatttagaaatttccttaattttctatttcactgctaggcacgtatccatatttgggggaatccagtatccccttaaaatcaagcaggtagcagcgaacctgggcatgatctgtgggagcttctgggctccttccttctggtcacaatcatcttcaacaagccttattgctgagtatttactagaataaaggacacccacatcatgaagtcctttaaatacggagataaggatgmatatcattgttgaaaaatgcattggataaaaaatcatgagataccgatacacacctatgacagcagccaaacgctggaacatggacgcctccaagtgtcacccagcgctgccgaggacgygggaacacggacgccacccggcgctgctgaggatgcgggcgacgggggcgccatcacagctgctgggagtgaaaaatggcgtggccaccgttaggctgattgtcactgtggtgaggacatgggcgatgggggtgccatcgcagctgctgggagtgaaaaatggcacggccactgttaggctgattgtcaccatggaggacagtttggcggtttcctacaaaactaagcatactcttaccatatgagccagcagtcactcgtgttggtctttacccaaaaaagtggaaaattaatatctgcaaataccctgtgagggaggctgtgtgtgtgtgtgagggaggctgtgtgtgtacgagggaggctgtgtgtgtacgagggaggctgtgtgtgtacaagggaggctgtgtgtgtgagggaggctgtgtgtgtgtgtgagggagactatgtgagtgtgtgtgagggaggctgtgtgtgtgtgtgagggagactgtgagtgtgtgtgagggaggctgtgtgtgtgtatgagggaggctgtgtgagtgtgtgtgagggaggctgtgtgtgtgtgagggaggctgtgtgtgtgtgagggaggctgtgtgtgtgtgtgagggaggctgtgtgtgtgtgagggaggctgtgtgtgtacgagggaggctgtgtacgagggaggctgtgtgtgtgagggaggctgtgtgtgtgtgtgagggagactgagtgtgtgtgagggaggctgtgtgtgtacgagggaggctgtgtacaagggaggctgtgtgtgtgagggaggctgtgtgtgtgagggagactgtgagtgtgtgtgagggaggctgtgtgtatgagggaggctgtgtgagagaggctgtgtgtgtgagggaggctgtgtgtgtgtgtgagggaggctgtgtgtgtgtgagggaggctgtgtgtgtacaagggaggctgtgtgcgtgtgtgagggaggctgtgtgcgtgtgtgagggagaccgtgtgtgtgtgagggaggctgtgtgtgtgagggaggctgtgtgtgtggggggaggctgtgtgagtgtgagggaggctgtgcttgtgtgtgagggaggctgtgtgcgtgtgtgagggaggctgtgtgtgtgtgtgtgtgggaggctgtgtgtgtgtgtgggaggctgtgtgtgtgtgtgcatgtgtgaggatgcatggaaaatatccctactttccactcaagtttgcagtaatctaaactgctctaaaaataaagtctattaacaatgcactggggatggtgtctgtgtccactgcattcagcacagggatagtctaaggcaaagagaatcaatggttagtttatttcaactgtcaagtagctaaaattattagctaaaactgattttaaaagcacaaactatattatgcattatattgtatatattctaaataaatgtttaaaagaaagttttcaagaaagtctaatataattttaaaatatatttatgacattgtatgcaagaaacaaaatttaaagaatgaggctgttatgcttgagaaatgctttgcttggaacgttccaaaattgataggaattgtcctgggccatttttctttatgaaaagctgaatgatttgatgaggttgcctgggaaggggatcctcagctgcatgttgcgaagcgttggctactcacagatgtgcttctcttatatttggcaccaaatcaccaagcccygtgtgcagacacccggagtggccgagtggggcccggaccagccaggctctgccatgccctgagctggccacgcacgtccaccccgggggtgcattttccaatgtgcgcaagaggccggggagctgcaggcagccggcaccgtcactgctctggggccggccgagagcgccttccttctgagggtggggagtgcagctcgcgggctccgcggctgagtggagccctgggcttctgagcctccctggcctcagggatcggaagaggccgccggccctggcctaggattaggtggtcactgacttgggccccgcttgggggtccaggaacctggcttttggttcttcctggcccgtggctcactccctcctctggggccccaggccttggtcctgaggcctaggattgttctgcattgtgagcacgggagctgggccgtctcgacgtgctgcccagttcctgcttgttgcctttctattttcaagatattttcattcgaaaagcagagtaggaacactgggtatgtttgaagtcgctccttattttccctctttgcccctttctccctcctcccccctttcccactcctgcttgcactgaatggtgcgtgtctgaggaaggcaaaggagcgggcacatctgcctgtgttcccgcctgtggtgcggcctgtccatcacggacggtggggggcgccgggctctgcagacgcgtccccgagagccctccgcctttgtgtggcctcgcaggcatctcgggccggctctcrgacaggaggcrgcgyggccgggctgcacggagggaaacggcgcgggcctggcgtctcctccttgccattgtccgcccgcccgcgcagctgccaggctgcctcccggattccctgggctttgcaaagtcccatagaaacccgcaggacgcttgcaatactcgaggttattttctgctaatcacccggccccgtcgtcgtgagcatatatgcaatatcagaccagcaattaccgtcagcctggccctgggcaaatgtgtttctgctaattacacttgttgcatttgaatggctttcttcagccaagctgcacggcgaaacctagtgaacaataaragagaccatttccccttccgccccgcccgaagctgcagatggccgccctgtgtggaagcagtagcgcctgaattaaccttttgtgtgcaccaaagaaggtaatttgaatgtttgaaaccccacaggaagcttgtctcaaagtgaacaattcgccgaataaagactaattggggactaaattaattagaaggtgtggttggaaaggatgttgatgagcagagtctgccatttcagacaaatggaatcgagctaaataaattagtccccattagtcccacaccgttcgccagccccgcgcctctcctgcgccgccggaaaggagcccgggaagccgtgcttgcctcccacgcagcccagggagaggcgtctccgccgatccttgtagctcctgcaaagtaatatttatatttcctgggtgttctgtttttcatctggaaaactggcctggaatgttattgactttgtttttttgttgtcactgagttgtcagaggcaagttttacataaaaaatgtgaaattacataaaaggagggctcggggggtatggaggaaagtggagtgacaacattgcagccacactggactttctctccaccttggcatttgtgttttccgtgatgctcggtttttatctcacaaaccagcatcctccgggtgctcccgggtcctaacagccctctggtgacgccgtgctccaaaacctcacggcggcacatgatcagaacgcattgcaaggacgtgtgtgacaccttcctgctctctgaaaatgaaacgtctcgttctgtcttatctccttcccttctcacagatggagtgtttggaaggtgccagaaggttccggcaatggacttttaccgctacgaggtgtcgcccgtggccctgcagcgcctgcgcgtggcgttgcagaagctttccggcacaggtagggcgggcgtgggccgaggctcggcggctgccgcactgagcgaccgcacgggcttggcttctcctcctgggcggtgaggagctgggacggactgaatccacgagtgtggtggtggaaggggcaggtgggagccgggcgctgggctcatgggtgcttcctactgggatcgtccgttcctgggtttggaggagcccaggcctgctgcctcctgtgtctgagggaggagatgmcaggaggctgcagtggcccgcagctgggcctggcacaaagtaggcaggcgtcggctgcttatctgggcctggctgggtccrgtgcaggcgtggctcggcctggagagaatcagcctctgcctgtcactgttgtgaaatttttgttgcaggtggtccctgcaggggtgatgagaagataatttttaaaattatgataatttaaaaaytatatatggcaacatggtaggaccagggaattcccacagcaccggcccactgctgcscttctttgactgtgaagtgagggctcttggtcagaagcagtgctgtgtggacaccatggtgatggataaggcgttctgactccacggagggtagttctggcaggagcactgtgcgtagggaagggaaatccacatctggagtaagcgtctagtccagcaaggaccattccccaccccttccacaggggaagctgcctgcggaaccacctgccccccggcggctggctgatcacctcggggaatgatgtcatgttggggactcagggatggtctttgtggtggctgactggggactcaagggtggccacagcagggctggccttgttgagtgggagcccaggcatcacctccaactctgccaccgcgaccaccttgttcatgggcccatggggcaacggcagggtggctggggaaagaggctgactggtgtccacagaacaggtcaccctatccacttggttattaaaatcctcctctgctgaggtcactctttggagaacattcacacgggacattcatatcttagtacttcataccacttcatagacgtctatctaatatgtctcttccycagttgcccttgtcaacaatgtttccaaccatattctctccgagtccctggccctccagccaaaccactggccacagcccattaattcataagtaatcacacatctggccgtttctccttccaggcggaatcaccagccaggtgcactgctggagattctgctcacaggagggtttccaatcacctctgtycttcaggggtcccgggttcacctctgtccttcaggggtcccgggttcacctctgtccttgagggcgtcccgggttcacctctatccttcagggrgtccygggttcacctctgtccttcatggggtcctgggttcacctctgtccttgagggcgtcctgggttcacctctgtccttcarggggtcccgggttcacctctgtccttgagggcgtcccgggttcacctctgtccttcagggggtcccgggttcacctctgtccttcagggggtcccgggttcacctctgtcctttagggggtcccgggttcacctctgtccttgagggcgtcccgggttcacctctgtccttcagggggtcccgggttcacctctgtccttcagggggtcccgggttcacctctgtcctttagggggtcccgggttcacctctgtccttgagggcgtcctgggttcacctctgtccttaagggggtcccgggttcacctctgtcctacaggggttccgggttcacctctgtccttcagggggtcccagcatgggtggtgtgtagtgctacacgtgtctgcttttgggtggtgcctgtgcattacacagaaccacccacaaacaaagcccaagtcacctgagcccaaagtccatggggaaccctccacaaagccaaactgcgggttgagagggagaaacgcgtgtggcggtgtgggccagggcgccgggcagctccctgatgcacactccaggccacactggactcctgagccctttccccacgggagcctccagggcggcttgggcccagctcctgctccatatgtgccactgtcgtttggcgatggggtgctgtgcgcaggccagtgccaggcttggcagggcacgtagatatgggtatcaatgtagatgacacagacggaatgctgcccacgcagggacaaacatggagcgagccatattgaaggaaggttgtgtaaatattcaactgtgtcacattttctgagtttgcttgtcttgtgagccttactctgtgtttcacccttcactttattatcttgagaagagggaaaagcctcatttaaggagcaaacagatgagcttttgccactctgatggctggacgtgcgagtggaggccaggggtctttcaatgagaatgggcgtgactctttcagaacttcccctgagcgtaatttcagcccggctctaggtatgtatgtagctatcaccatgtgytggcaactggcactgaacatcatcacgtttctgtgctatcctgtgctgagatgtggcgggggcagcgtgccggagttcacctgagctcccttgtcatgggagctagtgccacaagggctccggggccctgcctgggtgggcgtcctgggatgaaatgaaaccagagaatgcacaagactctcagcctgacaaactagaaaaaaaccaagaaatttaaggtgagtttcaaaaggagggatagaaaaatatctagtggcccygaattccccaacagagatgagttttctcacctatgattttaaagcaatagctttttctagtttgtctcatatatccatgaatttaaattacatgacaataatctaaccaaataatggcaaaaggtaactcctaaggaaaaccatctcagagaaaattaatattgtgccgagtgtcaggctatgtccacattcctggcacctgttcttgaggataagagcatctttatggagayggagtcccaggcagccccacatggggataggggggtcccaggcagccccatgtggagatggggggtcgtaggtatccttgcatagagacagaggtcccaggcagccctgcatctccagtcttgctcaggccctggctgagcgtctgcccaggtgtatcagaactgcccatggcctgggcagctggagccctctgcccagctccatccccagggactgtgtgtcctgggctgttggactctctagacagtgaaaagtcatcttctgcattgtggggacacagaattgctgacaccttcccagctggttctgacacagctgtggggtgtgtcctggggtgggcatttccagcaaaccctggggatgaccccgtggcaggaggacgaccctgtggcaggaggcctctttggttgccagggccattggtgtgtctagtccaggatgcaggcttctggaaggtgggcatgctgcgaaggcacacgtacctgcacatgcattcacatgctcacgtgtagacacagacacatttgcacacacacttgcacactcatacacatgctcacatgtagatacccacacgcagacaaacctgcacacacattcacgtgctcatgtgtatatacccacacacgcacacacctgcacactcacctgcacacacacatgctcacatgtagacatgcacacacgcacacacccctgcacactcattgacatgctgacatgtagacatccccacacatgcatgcacacctgcacacacacatgctcatgtgtagacatccacacacatgcacacacacccatgctcacgtgtaggggatatctacacgtgagcacgtgaatgagtgtgcaggtgtgtgtgcgtgtgtgggtatctacacatgagcacgtgaatgagtgtgcaggtgtgtgtgtgtgggtatctatatgtgagcacgtgaatgagtgtgcaggtgtgcatgcatgtgtgcaggcaggcacacatgcatgcacacttgaaggaaagaatctcaaatcctggtgtcttcctgagttttgtcagcctcacatggggggagtgtttgagtagggaggttttgcgtgtgggtgtctacactggagcacatgtgtgtgcaggtgtctgtgcgtgtgtgtgggtgtctacacgtgagcacgtgtgtgtacatgtgtgggtatccacgtgagcatgtgaatgagtgcgcaggggtgtgtgcatgtgtgtgtatgtctacatgtgagcatgtgagtgcatgtacaggtatgtgtgcatgtgtgcatgtgtgtgtgtctacacctgagcacgtgagtgcatgtgcagatgtgtgtgggtgtctgtgtgagcacatgtgtgtgcatgtgtgcgtgtctacatgtgagcacgtgagtgcgtgtgcaggtgtgtgtgcatgtgtgtgggtgtctgtgagcacgtgtgtgtgcatgtgagtgtctacacatgagcatgtgagtgcatgtgcaggtgtgtgtgcatgtgtggctgtctacacgtgagcacgtgtgtttgccttgtgtgggcgtctacatgtgagcatgtgaatgagtgcacgtgtgtgtgtctacatgtgagcacgtgtgtgcatgtgtgtgtctctacacgtgagcatgtgaatgtgcaggtgtgtgtgcatgtgtgtgggtgtctacatgtgagcacgtgagtgcatgtacaggtatgtgggtgtctacacgtgagcacatgtgtgtgcaggtgtgtgcgtgtgtgggtgtctacacgtgcaggtgtgtgggtgtctacacatgagcatgtgagtgtgtgtgcaggtgtgtgtgcatgtgtgtgggtgtctacacgtgagcatgttcatatgcaggtttttcaggattccagaaatgattctgtcttggtaactgcgcttgaaacagagttgatcctgtgcttctgcctgtcgtcttcatccaggccacttcttgcaggtgcagttgtcagattcattgacagacagctgcttgcgcrgccttcagagtcttctgcacgaagaggagggtaaatgggagttaatttcacaaccttcttcctccaggtagatgtgtacatcacagaacaaaatacgttcactgtgtttttaccattcttgtctactacaggcagcattatttcatgggcagacacactgctctctcatgtatgatttttttttaaatacatttcactttttctgacaagccattaaaattcagcatttaaatgtcactcgttggcatgcaatttgctgtcatgaaaacgactgtggattcatttcctggtaagaatcttctgacttattgagctgcatgtcagaagcaaaaagcaaaaaaaccaaatatgtacataaaacagtgttatcattccttaaaagagaaggaaaataaatccctaaataatgtggactggaacacagaaatccaaggctggccgcacgggtcctggctgggatggcatccggggagctgctgctggggacgtgcttgccggcacaggtcaggggagccgggttctgcctcctccttgcccactctmtttgcgccctccctgtgctcgcctgtcttgttttacctcccatcctgggcccttggagcttggaggctttccttcttgctgagaggagctgagatccaccccctacccgacctccaggcagatgtgtggtgtggggttggggagggagaacgtctggctcacgtctggtgagcacaggtgggtgtgttggagtcacgcgtggtgctcaccctccgtgtgactcgcgctctgtccggctcagggctcgccctccgtgggacttgcgctctgtccggctcagggctcgccctccgtgggacttgcgctctgtccggctcagggctcgccctccgtgggacttgcgctctgtccggctcagggctcgccctccgtgggacttgcgctctgtccggctcagggctcgccctccgtgggayttgcgctctgtccggctcagggctcgccctccgtgggacttgcgctctgtccggctcagggctcgccctccgtgggatttgcgctctgtctggctcaggctgcgcagggcaatggaggaacctcccgagcaggcccagcggctccttccacccagcccccatctccggccggccatttgtgaggccctctgccactgaggtgcactgtttccaattcctcattcacaagctctaccttccacaggagcccagagcatgaacgcattcggccatggtcctcaccactctgcgaggagcacagcctcttctccaccgtccgatagcgtgttcctcctttcccaggcctcacagaatgctctgtctgcatcctcccagcattccattcatgatggccgagctgttctctaagagatactgctttgtcttccttttgatctctcaacacaagcacttttaaaaattcatccatggcgaaggaggcttgttccagcacacacctcaagactcagcctcaacaagtttcccagacccaaagttgcttctgcatttttaggaatttgtcacagccgtgccgctacttcccggtgccaatttttctcttgtttgagttgctgtcacaaaaatcacatggcgtgggtggctgaaacagcaaacattgatttctcagagctctggaggctcccccatatttggtgtctggtggtgggtggcttcctggttcatgggtggcatcttccccccgtgtcctcatgtggcagacggggcaagggagcgctctgggatctctttcgtatggacactaatcccacctgcatgggcgccgtcttcatgacctaattacccccaaagccttcacctcctaatgctgtcacactggggatcagaattccagcacgtacgtttggggaggatgtcaacattcagtctgtatcatagcatgtgtattctatgaccatagtgtatctcattggttagtttttatatttgaactaatcttatattcctgggataagtcttacttgaccatgctgtataattctttttatatgtttctggatttagtatcttagtgtttcgttgagaatttttatgtccgtatttataaaggatatctcttaatcttttgatatctttggttttggtattatagtaatacataacttgtcaaatgcattagtcagggttctctagaaggacagaactaataggatagatgtgtatataaaggggagtattttaaggagtattgactcacaatcacagggtgaggtcccataataggccctgaggagcaaggaagccagtctgagtcctaaagctgaataacttgaggtccgaggttcgaaggcaggaagcatcccgcaggggagtagcgtgtaggctggaagactaaactacttttgtgttcttctgcctgcttttattctggccatgctggaagctgattagatggtgcccacccacatgctggaagctgattagatggtgcccacccagactgagggtgggtctgcctctcccagtccactgactcaaatgtgaatctcctttggaaatgccctcacagacacacccaggatcaatactttgcatccttcaatccaatcaggttgacactcaatattaaccatcacatcaagttaattgaagagtattctttctttattttttttggaagactgtgaaagaatgatgttaattcttccttaaacatttgaagtgaagctattgcaaatggaagccatctgaccatgggcttttctttatgaggttttaaattactcattgaatttccttaattattataggcatattcaaattttctatttcttcttgagtcagtttcagtagttcatgtcttcataggaatttgtcaatttcacctaggttatctagtttgttggcatatgattacttatagtatttctgtatagtccttgtaatttttatgtctgtaagatcagtaataatgtcttttcattcctgattattttttgagttgctttcttagtgtttgctagaagattaatattatttaattttattaacaccaagttaatattaatttattaattcaaattaacattaagatctttataataatctagttgaattaataccaacttaattttcaaacactctctgtcattttttctctttccctcctttgtgctgttattgtcatgaaaattatatctttatagattgtatgtttatcaacatggatttataattattgctttatgtaggttttttaaagaaaattaggagaaaataaatgttacatactcaaatatttgttctgtctttcatatttactaaataatgacctttactggtgctgtttatttcttcatctggatacaactcactgtctaatgtcctttcatttttgcctaaagtactccatttagaacttgctagggaagggttgttggaaaaaattctctttgttttttgtttgggaatgtattgatttctcctttagttttgaaggatcgattttctgaatatagaattcttggttgatagacttttttcttttaggactttgaatatatcattccactgcctcttggccttcatagtctcagatgagaaattagttgttaatattattgaggatcattgcctattttctgttgcttatcacagaatatctgaaactgggtaatttataaagaaaaggaatttatttattacaggtatctgggctgagaagttcaaggttgaggggcagaatcaggtaagggtcttcttgctgttggggactctctgcagagtcctgaggtggcacagggtatcacatgatgaggaggctgagcatgctagtgtgctagctcaggtctcccttcctcttcttagaaagtcaccaggtcccctcttgtgataacccacatgaattaattcattaattcatgagtggattaatccattcatgagggcagagccctcatgacccagtttcctcctccctcctgatactcccaaattagggattaaacttcaacatgagttttggaggggacaaatatctagtccataacatgtgtgacaagttgcttctctcttactgctttcattagatttactttgtctttgggttttgaaggtctgattttgatgtatctaggtgtggctgtcttagagtttattctacttggagttcattgagtgtcttagatatgtagattcatgttttccatctagttttgggaattttgggtcattatttcttcaaatattctttctacctcattcttcctctcctacatctgggacttcctttacgtgtatctcagtacattggatggtctctcacaggtttctaattttttattattctttttttttctgttcctcagactggataatttcagttgacctatcctgaagtttgctgattctttcttctgctgctaagatctgctgttgagctgctgtactgaatttttcaattatttttgaaatataatttctatctttttattcatattctctatttgatgagacactattttcctacttttatttagctctttagacattgttcttacagtttttggagcacattaaaaatagctcatttagtctgggcacagtggctcatgcctataatcccagcactttgggaggccgaggcgggtggatcacttgaggtcaggagttcaagactagtctgcccaacatggtgaaaccccgtctctactaaaaatacaaaaattagctgggcatggtggtgcatgcctgtaatcccagttacttgggaggctgaggcaggggaatcaattgaacttgggaggcagaagttgcagtaggctgggatcacaccactgcactccagcctggatgacagagcaagactctgtctaaaaaaaaaaaamcaaaaaaaaaaaaaacaaaaaacagctcatttaaagtctttgtcttgtaagccatttggcttccccaagaacagcttctattgttttcctgtggaagaggcacatttgcatgtttctttgaatgcctcaaaaatttttagtaaaactcaatattttaaataacatagtgtggcaactttgaaaaccagaatttccctctccttaggtgttgttgttgttgttgttgctgtttattgttggttgcttgcttagtgactattctgaactaattctgtaaagtttgtgttttttcatcatgtgtggccaccaagtctctgctcagtttggttagtggtcagatgatgaccagacagattgccttaaatgcctagaaacaagcctcagtctctgctgagggttctgtgtgagtgtggggcataccttcagccatcagacaggcagttcacagctctgttgtagccttcacttcatgctggcccagagcctctacatcagccagtggtgagagcttagagcctcatgtcttccctgagtgtgcacagcctgggcaggcacacagccctccatgtgttgtggccatccatattccaaggatcgtgtcagagctttgcaaagcacctgtgcacatctcattttccagcttttccttcaagctttctggttagcctattgtttgtcccaaccattatcctctacctcaggtggctggtaagtaaaacattgtctctaaatgttttcaacaaatgcccccagggaaagacttttcacatatgtgagctttgagttggatgaaataaagacagcctttccagtgggtcctccagggaacaaccagacaggtcaagtagtgacaattctctgggaatggggctttgaaggcactctaaccccaccctgtgctttctggtggcttccaggctgttggtttttactgccattgtgggctgctcattttcaagcctgtggcagagctgaggagagggagctggaaatagggtgagttaagatgccaggaagttcgctgttcttgctgagattcagccatttctttctttttctttctttctttttttttttttttgagtaaattgctctgatttctgctagcctttagttaatttccagagttctgtaaaagttgattctgatatttttgggtggttttctcattgcttttatgaaggagggaatgtttaaggttctttgccattttcactgatgtctacagctacttcctaaggctgcttttctctggtcctctcctcaacgttcatctggacattgccttggggatcactagctggggacagcttcacttcagtttgatttaagtgtgatcttggtttgttgatttccttgtctagttgctccgtctgttttatgtgggaattggggaatacccaaaaacaatgctgccatggccacatccatctttttttctctttctctctccacctccctccaccactgtctccctccctccctctctccctctatctttagctctatgttttgtctaatataaaaatgaatccctattttttctgttgtcctttccttgttaaaaatatccgttggattcctctgcactgaaggaaagaagccactcttggctttagagtataaaccaaaaataaaattctaagtcccccagccagctgaatggacccttcctcttggccaagggcactctaaagtaaacctgaaacactagttcaggccatgatgggaaggggtgtttggacacaccttatcctaccctcctcccttggtgtccaggcacagctgaccagcgttaacattggaacagaggcgtgaagacagacaaagcagaccttttgcagctataaggtaccaacatggcagattgcaggccctgaaagaaatggaagtattttaccccaaaatatatttctgcgatatatttaaatggcttgcaaagctgtctctcctgggaaatgtctacattctgtagagaatcccttttcctttccaggtcttttccctgatccaagagggaattaattaagagtctggcaccttttcaagtctgataaacattgaccatctattctctctgaagcctgcaacctggaggcttcatctgcataataaaaaccttggtctccacagtcccttatcttaacccagacactctttctaccgattcccagtccttggataaactcaaccaattgccattcagaaatctttgaattcacctatgccctggaagaccctgcttagtgttttcccatctttctggaccaagcctgtgtacatcttagggtattgatgggtgtcttatgcctctctagcatgtagaaatccaagcctgtgtacgtcttagcctattgacgggtgtcttatgcctccctagaatgtagaaatccaagcctgtgtacatcttagtgtattgacgggtgtcttatgcctccctagcatgtagaaatccaagcctgtgtacgtcttagcatattgacggatgtcttatgcctccctagaatgtagaaatccaagcctgtgtacatcttagcatattgacgggtgtctgatgcctccctagcatgtagaaatccaagcctgtgtacatcttagtgtattgacgggtgttttatgcctccctagcatgtagaaatccaagcctgtgtacgtcttatgtgtattgatggatgtcttatgcctccctagcatgtagaaatccaagcctgtgtacatcttatgtgtattgatggatgtcttatgcctccctagcatgtagaaatccaagcctgtgtacatcttatgtgtattgatgggtgtcttatgcctccctagcatgtagaaatccaagcctgtgcacatcttagtgtattgttggatgtcttatgcctccctagtgtgtagaaatccaagctgaagcccatccaccttgggcacatgatcttaggctctcctggggctgtggcctgggccattggtcacccacatgtggctcagaatacatttcttcaaatagttttcagagtttgaccctcttcatcaacaggagcagtagttgtcagccctgacgttatattaaaataayttgggagcctcggaaaccatggtgtctggggcttacccttcaaagattctgaattgatttgtctcatatgaggcctgccatcagcatctcctaaaaattctccaggtgatttcagtgtcttcatatttattttcttccatgaataaaatgggactaacactctctgaagcttgttttatataccaacaatatgaatggctttcttcttattcctgtcttaaatttttatccasctgttttaaggtttacacattgcaagcttaatgacattttaatcctgtatggtaaattagtataatgcattttgttaaaattttcatagaataatggagaagggaatactggatatagtatagagcagtaaaattttaamagtagttttaacttacagaattctactggtgctttccttttgctgtagggaagttacatctctttatttagcagattaaagagacggaatcacagagggattacagggtgttcctggggtccttcggctggtgtggaatggagagcggaattccaaactcccagcagcagagtgcagagccgtgatttttaaaatgttgttctcaggatcacatcctattattgaaaattactgaagaytccaaagaatttttttttttttttttggtgggttagtgctatccacatttgttaccttagaaattaaaattgccaacactttagaaaagctgtttattaattcactttaaaataaatcataaaattatttcattataaacacagtagctatattttccaaaacataaaaaagtgctaagtgtgacatttttgttttacatttttacattcttgtttcacgcttttgcatatctcattgtttcatttaacagaaaacacttggattctcatctctgcctcccactcattctgtgtcatttcctgccacatagcctctggactgttccaagttctctcataaaagagtacacgtgagaaaggcaaagtatgtcttagtattttatgaaaatagttttggcctcatggaccacttgaaagagcttaggggcctcttacagttgcaggctgtgctctgagcattgattgtggagagacaacagggtggccttggagtccggatggagtttaagttccagctgcggcacgtgtgagtcgtgtcatcttgcgcacatcacgtaactgccctgttttggttgtttatcgtgaaacgagggtggtcctacatgccctaggttgaatgtgctgggaccaaactctgagacagagatttgcatgcagtcggtgactgggggtgatctggggtaacccccgtacaggtgagggaagctgaattgggcagagggagaaggtgagctggaatgcagtttaagaggaccgagctgatcctgtgaggtgctctgcagccggagctggggttccccttcagggttgacccaaccaaggctgggggctaggcctttgtgtcccacatgagggatcactgatggtggttcacctccagggagcaagagactgtaacttagggagtggctgttcccttgggctcaggtggtgatggggagggattcagcggctaacccctagccctcaacagctggtgtctggggagaggatgcagagtccccaggaagcagcagtgtggctgtcacagtacccaccaccctgaatgtcatcatttctcaggtgtgtattgttttcccatcactgaaattaggaggcatcttttataaatagcacatcatagtttaactgccagcgggtttgtttttccttagcagtactagagtaatggtctgtcttgcaatcaatagcttcctagattggaggaggtcataccatctcatgggacaggggattgctttttttgagacaggctcttactctattgcccaggctggaatacagcggcacaatctcggcttactgcaacctctgcctcctggactcaagtgatcctcccacctcagcctcccaagtagttgaaactacaggtgcaaaccaccatgcccagctaattttcgtattttttggcagagatggggttttgccatgttgcccaggctggtctcaaactcctgggctcaagcaatgcacctgccttggcctcccaaagttctgggattataggaatgggccaccacgcccagcaaatgggattgttcttaagattaatttagatggtgccactcattaaatcctcaggaagtgtgaatgcactttgcttatcagtactaagtgtggtagaagcttccctaatgatgttgaaggttcacataactcaaaccagcaagagctggggagtggtgtgtaggttaaccgggaagctgataaatacagagcattctgctaagcacctcgggagmtaagacgatgactcagaattgggagttctagttagctgcttgggaattctgaataaatacatctgttcagcttcttacaattgagcgcatattaatgcaaacagatcagaacagggaggaggggagtgtgtcaggagccgttaacacagagcctcgggacagctgagttggtcgtggttcgtctgtgttcatgccctgcaatgctgtctgtttaatttgcacggcccgtgcaaagtgcaaatacaggtccttagttcagaaatcaaggaaaagtgcccctaaaggaactagttatagtataagatgtttcctttcacaatctccgtcttgacttgtcatgggatttttatttgctattcagcatcattctaaaaacattaagatttttgaattattaacatgaaggttaccattcatctgtatatcgtgcgttgctggtttcaaatgcaaatgaaagaacatttaattcacatgcagaatctgaacaactacatagttcatctgtcacagctcaaacatgcatatgtatttcattctcattacagcggtggaaatgctgtgtgaaactcactcggctgtgtttatttcccttcatgaaacagcccctgtccaccgagattctccacctttgctcacacatgagaaggactgtgggctgcccacctcccctccctccacacggccacgttcagcataaatggtggcttatgtgggaaagcaatgtgagtgggagagagggtgggacccttggtcgtttgtgtttcttagaacactgttgcactttgtggtttgcagcaagctctgggtaagcagaggagtggcctcttagggccacatgagcacagacagacacgtggggggcgaggcgctgcgggactgggtggcgggcgaggcgctgcgggactgggtggcgggcgaggcgctgtgggcgtgcagattggggtgtcttctctgcaggtgcgcgcaccacgtcgcctcatgggatgtctcacacaaaatataggttgggagataaaatctttgagaatttcaagacagcaacagcagcgtgtcaaagcaaatgagaaatttttctgcacacaggcccctggcgactacctaggtccatgctcccgtgaggctgcccaccttccaaccctagccgtcggatcagacgatacgaggggacctttggccgtttgctttatggccttgactccaagggctaggggtagagcctgactgtcaccattgggaaatgccacagtgggcccatccctcataattacaatcatttccgcatttgtttctatgaaatggacttcagttaagaaactttgcttcttcattgacccatattatcatttcagaggcattctctgtggttcaaagtgacataaattgcttgctgccaaaacatcctaggtttctacaaagtaaacaaatattttcaactgtcagacagtgggaaaaatgtgtttcttgggaggaaatggtgctcgttttgcctgctctgaccccatgaaccattcagtggtgttaaccggaaaaggcctttccagaacctgcccctgagctgctaatactgtccaagggcctttcagggacgttctcctcccagaccaaggtgctcattttgctgggttctggggtaaagacccaaccccagcaagcacctgccagggcttccctggggggcctgggaaccgccaactgctctgccacttcctgagggaggtgagggagctctgtggcagtgaaggatgaatgcagccagcagctctaggactgaggaatccatgtctgctgaaaactgtcagagaggtgagaagctcatttacagctctcagaaggccctggctatctgtctttgccatgttaatgagctaaaaaaaattgcttcctggtcaggcgtggtggctcacacatgtaatcccagcactctgggaggctgaggccagcggatcaagaggtcaggagtttacgaccagcctggccaacatggtgaaaccccatctctactaaaaatacaaaaattagccgggtgtggtggcatgcacctgtagtcccagctactcctgaggctgaggcaggagaattgcttgaacctgggaggcagaggttgcagtgagccaagaccatgccattgcactccagcctgggcaacagagtgagactccmtctcaaaaaaaaaaaaaaaattgcttcctgagagccctgcgtgcatctgcagaaaggtgggaaggacagacttgcatggcagtttccccagggcagcccaggtctgcaagctattcagtaaccactgagatttgtctcgggaatatgccagtcttgggtgggataaaaagcattgattagtgtcaaaacttcccctccagtttgaatttaataatgcactgacatcatcgctcaccagactgctgtgacgttctgtccattagtgtctgcagggaggtcatgaacatcctgctggatttgaaaacgggctgagctgcaccctccttcctgtgcggttccctgaaggcccctcccaggacaatcggcagtggctgtcagggccacagaggcatcgtgttcctgtggctcaggaggtatttgggtgctggcccaggaagaagtgatgacatgaattttacccctgggtctgggctgtgctgtttttacttttttgaaggtgggaggtccttggacccaggggctcagcaggaagaggagagaggacaggcaaccccaggaggtgcttggaggtgacattgtggggcctgatttcctcctgatgtgcccgagcacaactttggcacatcctgctgggcccttgcgccctcctccaatctgaagcctcacagctttttcacttgggaagtttctcggccattccttcagaggtggcctcccccgcaagctcttcattcttttcttccagattcacggcacataaactttgttatgtgcacaaaattattaaaaattacataacattaccttcaggccttctatataaggtataaggaaacacaagtaatttcatgtttcgacttgggtcctgtccccaagatatttcattatgtacatgcaaatattccagaataaatccaaacatatctgaaatccaaagcacttctagtcccaaacatttcagatgagggatattcaacctgtgtcatattattttattcctttttgtgtgcctgaaacgtttcataataagaataaaaggacgaacaaagcaagcaaaagacattaaaaagaagaaaataatgaagacaagagcagaaaatactgaaataggtaygaagaaatgagggcaagcatcaagaacacaaacagcagaaatatctctgggtctttgaaaagacttacagagctctttttaccgacaatgacaaaaaagggcataagtacacaattaatgagaggaaaaagggaattccaccataggtaaattgaattcaagaatcgtaagaaaacactactaatgactttgttctaagaaatttgaaaaggcaattagaaaaaaaacctgtaagttgataaaagtgactcaaaaagtaaagaaaacttgagttagtctatattcattaaaacatgcattccttaaattttcagtcaacttgttttgtaacttcagtaagagtagtccacattcacaataggaaattcattctgtccacaaaccatcctattgtgatattctccaaaatatatgtggagaggtgagggaacagcataactggggtgtgtggttaggtaggatgggggttagttattttaaacataggcacgtgtggtgtgcacctgtagcactcttaacctctaaacattggccattctctgttttacaagaaacctgattatattttttactaagtccatatttctttgggacctgtccttaatgactctgaaagacccctccttactgctgggttttgtagtcaaaggagaaatgagggctgtacgtgaagacccttcccaagacaagatgcttctgtgtctgatgaagaatgaagcctcaagtcaagctcaccaggtcatgggctgagggttgctgaaccacaaggagataccgtatcacaaatgaacggactttgcagtgtcatcactgtggctccaggggcgtcttcccttcccaaagggtttctggcagatccctttgaacagagagtttctctggtacatttcagaataggttcccagattgttaacaccaggacagaacggctgaaagccagagagttagcagctctctctgaatgatgatcaatctgaaatgaagagaaagtcattctgtagctaggaaacatgatcagtttttaaaagcttatgcccagccattggcagaagctgtatatgtgctgtgctggtccctccgggactggatcctgagagctcccaggattttcaccgttaccgcttcagaagcagaggaactagtaaggcgcacgtttgtgtttggatggaatgctatccatggacattccaaatgttgcccccggccacatctgctggtctctcctgccccaccaccccaactgctccaccacccaagctccacctcccttagagttccctgagtgccgggcgtgtccacctgtggtcttcccatggtcttcctgtgggccaggtggccatgtgcctctgtgaccacagcctacatgcttggctccatctgctgcctcagaaaggccaactgccgcccagaagagagtgggtcaggagggttgagatgaagtgaaacaggaaaagttcccttattcccctcacagggcgtgcgatggaggagtgggttgcttcttcagtgccccactgctcccacctgcaggggagcatacagacgggcaggctgtgggctcagaccccacggccgtgtctaggggtgaatgcttacagctcctaaagccccagtgggcgtgtgttacagggtgcttttttagtttcgccgtctgtgggcggcttgtgttaaccagctcaattagaccctctgccttattgcaaggacagggggctttctgtgtcctggagtttcttgccttggtgtactggaagaatcagatcgcacatgggcttggagaatgagcgcaaggttttatagagtggaagtaactctcagcaggagccagagggagatggactgggaaggcagttttcccctggagtcgggccgctcagcagccaggctctcctccaactacctmgtctgctggtgcctgtcagtgagttcttctgccggtgtgctcctcttgacatccagcccttgtgtctttgcccrctagggtcttggggasctgcttgtgtctctgcctgctagggtctcagggtttttataggcacaggatagaggcrtggtggaccagggtggtcttgggaaatgcaacatttgggcacaaaaacaaaaatgcctgtcctcgcctaggcccatgggaaaggtccaggggtagagcccttgccagagacccgcccttctccacccagcacttccctgcccatctcccrtatcagaagcaatccaaactcatctttctgtttatttaactaagcaaccatctcagacaaggtgcctgatgatgtgaaaatgaaaagtgagaaaatgaggattcgacagctcacctcagctgctagtgcacaactgggtgctatggagatgtggggcagcatctgggcagacaggcagggtcagcgggcgccgtgggcttggaccctcagaaaggcgggtgaaccgygcgsatggagagtggtgcagtgtttgggcagacaggcagggtcagcaggcaccgtgggcttagaccctcagaaaggcaggtgaaccacgatgtggtgcagtgtctgggcagacaggcagggtcagcgggccccatgggcttagaccctcataaagatgggtgaaccacgcacatggagagtggtgcagtgtctgggcagacaggcagggtcagcgrgctccatgggcttagaccctcggaaaggtgggtgaaccacgcgcatggagagtggtgcagtgtctgggcagacaggcagggtcagcgggccccatgggcttagaccctcrgaaaggyrggtgaaccacgatgtggtgcagtgtctgggcagacaggcagggtcagcgggtgccatgggctctgaccctcggaaaggcgggtgaaccacgatgtggtgcaatgtctgggcagacaggcagggtcagcgggcgccatgggcttggaccctcagaaaggtgggtgaaccatgcgcgtggaaggtggtgcggtgtctgggcagacaggcagggtcagcgggcgccgtgggcttggaccctcagaaaggtgggtgaaccacgcgcgtggaaagtggcgcagtgtctgggcagacaggcagggtcagcgggccccatgggcttagaccctcagaaaggcaggtgaaccacgatgtggtgcagtgtctgggcagacaggcagggtcagcgggtgccgtgggcttggaccctcagaaaggtgggtgaaccatgagcgtggaaatagaagcacactgaattctgggcgacccgtgctcccaggtctccttgtggctggatgtctttcctgcctctcactctcccccgggaacactcctccctccccgcttgctcctgcctggcctggctcagccctgcctctcgcatcctcctgtgtcagaggcacacgcatgtctgatgctgttgctcagggatatcagttgaggagctgagggccgggaattacgtgacttattcccaaatgagtagatggaagaaatggaacgtctgtgattccaggccaggagggaatagttgacgccagagtaaacctttaatttacatgaaaaacttacaaaaaatatgggagccagacatgaaaacaacaaactctcatgtaatttcatcactttgggggaaaacaaaaatccttcttatttttatgtatttgagaatcaagcttttgtgtctcagaaggtccttagatattcttgtaggttcaagtgatgttgagaaactgtaaacagcaagcacaacataacaatgtttccaccagcagcagatcgcgtacatgatggtggtcccatatggttgtagtggagctgaaaacccctgtcaccgactgaccttgtggccctcatgatgtcacagtgcagtgaattacatgtttgtggtgatgctggtgtagacgagccaactgcactcccacttgtatgaaagtctagtctagctgtgcacggtacatgtgtatttgctgtacttttatcattattttagaatgcactctttttacttattaaaaagcaaaactaacactcacacagactcaggcaggtccttcaggagatatgccggcagaaggcattcttctcataggagatgatggccccacatgtgctattgcccctgaagaccttcctgtgggacaagatgtggaggtggaagacagtgatattgatgagcctgccctgtgtaggcctaggctagggtgtgtgtttgtgtcttagttttttttttttttaacaaaaaagttttaaaagtggaagaaaagtgtaaataggaaaaagcttatagaataaggatataaagagactatttttatactgctgtactatgtgtttgttttaagctaagtgttataagaaaaagttaaaagtagttaaaacatttataaagtacacaagttactatttttttttttcgagacagagtctkgctctgtcacctaggctggagaacagtggtgcgatctcagctcactgcaacctctgcctcctaggtttgaacgattctcctgcctcagcctcccgagtacctgggattacatgtgcacactaccacacctggctaatttttgtatttttagtagagacggggtttaaccatgttggccaggctggtcttgaattcctgacttcaggtgatcacctgtctcagcttcccaaactgctgggattataggcgtgagtcaccgtgcccagcccaaagttactatttaaaggtaatttattattgaagaaaaaacatttttataaatttagtgtagcctaagtatacagtgttgatagtctagagtggtgtacagtaatgtcctcggccttcacactcacccaccccaccctcactgatgcactcagagcaaatttcagtcctgcaggctccattcatggtcagtgctctatatagctgcaccattttaatcttcttttttagactgaatgtcactctgttgcccaggctggagtgcagtgacgtgatcttgactcactgcaacctctgcctccgtggttcaagtgattctcctgactcagcctccctagtagctgggattacaggtgcctgctgcctcgccaggctaatttttgtatttttagtagagacagggtttcaccatgttggccaggctgaactcaaactcctgacctcaactgatccacccaccttgacctcccaaagtgctgggattacaggcgtgagccaccatgcccggcccatttttatcttttataccatatttttactgcaccttttaatgtatagatgatacacagatacttaaccttgtgttacaattgcctgtagcattcagcacagtaacttgtaggacagatttgtagcctaggcacaatgggctttaccatccagcccaggtgtgtggcgggctgtcccatctgggggtgcgtaagtgcacccgtgatgtttgcacagtgacaggatcacctaatgaggaattactcagaatgtacccctaccattaagcaatgcaactgtactactcttaggattaaaactacatggcttacctgtgaatgctttaaaagcttgcattttcttttctgatgcaacccacagtttttaccttttaattttaaagtatgaggtcagttagacttcatccctatttaaaactgaaaagcttgatttagggcattctttagtgttaatggaaaagcctcaccaggaggcgggctccatctgcttttgaacatcctggaataggggcagtctttgtttaatagawgcttcatttcagacaaggaagaaccgtcaccctcaggagaattagatgtctcaacagaggaggaaattgagacctatcggaactggaagcttaccagatggcagcacagaaaaccctggcatttctgaaagaagcaggaaggtggggagaggagggatccatttgcgggctgtatggaatgtaatcttgtcttaagcctcactaaaagctagacaggtcatggagacaatcaggcttttattctttgaaataattcacattacaggcttgtgtattactggccttatcaaataaaagcctttagactcatgtgggcagataattacaaattgatgtctgggcctcttgttttggaaatggcttttacactcccctcttctttctctccctctttcatctctctcttcttgagttaaactttcttgtgattttgttagggttctggtagtgttagctggctctaagagtaaatggcaaagctatatgaagaagtcacttttatttgaagtcaagaatcgagttacaaagtgcaggaacattggtgcagacagggaatttcatttaacactgtattcagcctcagaaattattacaaatcagaagtaataagtcagacaaccaaagacagcagcactgtccagggtcagtttcatctgtcagggttgtttcttgccacagaactctattttactttacccagtgaatcttaactttaaagacaaaaaccaatgaataaacactttttggaaaacattagaaatcaaccaaaatctagttaatttataacaattgggggaggggaagctcctagagcttagactaaaaaaacccaaacaaaatataaattccaataaatgatatcctcatatccctattgtttctccagatcaacaaatatgtgtgattctgtatcatatgactttgtatatcaagggaagagtggatagtatcagaaaaatccctagaaccctcaagtgtgaaaatgattagacatcttgaataatacaaagcaacacagctagatccacatcaaaagagtcatgaagaccaagtgggttgatcctggtgagtacattttgaaaactgtgaaacacaaatggaagctgttacatcatcaccaagtggggtggaatgaaggcaagccttggaaactcctcctgccatgaggttctcaactccccaccccagagcagaaatgccccatctctgcatcctgctcttggctcagcagacctcctcctcctctgtcaaagagcatccacattttatctgctgacttcttaaagaatcagatgctcctttccctgaatattttaaagagagtcacatagtcaacattcgtcagagatggacatcagcaaggcagcaggagaggactctccattgctcatccatcacagaaacaacaatttgaacatctatctgtgtgcaaaaataccttcacaagtgctaaggaaaccaggtgagaggtgatagcacctgggcatggcacagaaataagatgcactgaaaaggcagaaaaaacagttttgcatgactgggtcccctctcacccaggcctagcagcatgttgtggtgagagatgccctctatgtgggggaaggaaagagaagtgagtaccagactttgcttctaactctaaaactgcctcctgatcccccaccaaccaagttaaacccagcaccagacatgcccccatagcttcctactccaggctggtacccaaggacggaggcttcaggcctgccccaataccaggtaggatcatgcaggcccaggccccacacctgcccagtggacttagtctctgggcccactccgcatacaggttgaccccattggcctcaggctccacatcatctctggcaccaggctggccctgcagctccatggttagcagacaggacccaggcctatcctggtaggccccagcactgaaccagccctcactgacctgggctccaggagtgtccctgtggactcaggatccaggctggtccccagtgctccaggctccagaactcagagtccaggcccactccaatagacccctggtgccaggccagcccctttggacagaggctccaagaccacttctgcagacttaggctccaggccaacccttgtggatccaggacccaggctcacccccacaaattcaagctctgggcccaccttagccccaggacagccccttcagactcaggtatatggcctaccctagcaccagtcctgccttaacggatgccaggctctaagttcacccttgcagactcaatcaacaggtccactccagtggatccaggccaaggctcactcacctgctaacccaggcattggaccagcctgcgtgaggaccccaatagcaagcctacctatggagcatgccagatgacgcccagaatctgcatgggcttattgatgaagggcttacccaggcgaagccagtctacaaagaatagaataagtccctacttcccaaaatgtgcagacatcaacgtaaggcaacaacaacaacaacaacaacaaacatgaaaaaccaaggagacacaacaccaccaaaaaccacaataatctcccagcagcagactccaaagaaatggagataaacaaatggcccgataattcaaagtaagtgtttgaaggaagttcatgaacttcaagaaaatatagaaaaacaattcaataaaatcaggaaaacagtaaatgactgcaattagaaattccacagagaggtataaattattttttaaaaattctagaaaytctggatgtggaaaacacaataaatgaaatgaaaaatgcagtagagagtgtcaactgcagaattgatgaaacagaatccgtgaacttaaagacaggttatttgaaaacatacagtcagaggagaaaaagagtaaacgggaatgaagaaagcttatgggatttgtgagataacaccaaaagatcaaatatttgagttacaggtattcaagaaggagaagagagaccaagggactgaaagcatatttaaataatatgagaaaacattccaattctggggaaatatataaatatctaggtacaggaagatcaaaagtctccgattagattgaatccaaataagactatactgagatatattataatcaaactgtcaaaaatcaaagacaaagaggatcttaaaagcagtgagagaaargaagcaaatcacatataaaggagttacaggaaggtttatagcagacttctcagcagaaaccctataggcaagagagagtagaatgatatattcaaggtgctgaaggaaaaaaatggccaaccaagaatactgtacttggcaaagctgttcttcagaaatgaaggagaggaaaagaccttcctagccaaccaaaagctgagggattaatcaccaccagagctgtcctacaagaaattctaaagagagttcttcaagctgaaagaaaagaatgctaactagcaacatgaaaacatacaaaagtatagaactcactgataaaaataagtatacagtcaaattcagaataatactgtartggtggtgtacaaatcacttaagtctttagcatgaaggtaaaaagagaaaactatcacagtgatagctatgmaatttcttaaataatagctacaacaaaaagatatgaattgtgacattaaagtttatgcgtggggtgggtggagtaaatgtgtagagattttaaaaatgtgatcaaagttaagctgttaccaacttagaaaagcttgctataactgtaagatatttttatgtaagcctcatggtaactacaaagcaaaaaccttagtagatatgccaaagatagaaagtaaggaatcaaagcatatcactagagaaaatcacccaatcataagggaagacagacacagaggatgaaaggaaaaaggatttagaaaataccagaaaacaatgaacaaaatggcattagtaagaccctgcctgtcaataattactgtgaatgtaaatggattacattttctaatcaaaagacagagtggctgaatggctgaaaaataggacccaactatatgctacctacaagagattcccttcacttttaaggacatagactgaaagcgaagggatgaaaaagatatttcatgcaaatgaagaccaaaagagagtagaagtgctatacttaaataaaatagacttcatgtcataaactgtaaaataaagtcattatacagtgataaaggggtcaattcatcaagaagatataataattataaatatgggctaaaaactggagaacctaagtatgtaaagcaaatattaatatgtctgaagaaagagagatggactgtaatgtagcagtaggggacttcaatacccactttcggcaatggacagatcattcagacagaaaatcaataaggaaacatcagtcttaaactatacttttagaccaaatggacataacagatatatacagaatataccatataatggtagcaaatacacattcttctgaaacacagagaacattctccaggatagatcacattatgccacaaaacacattaataaatttaagaagattcaaatcacattaagcatcttttctgaacatcctggtatgagactagaaattaataacaggaggaatttcagaaaattgacaaatatatggaaattgaacaacatgcttctgaaccaccaatatgtcaaagaagaaattaaaaagagaattaaaagatctcttgagataaataaaaataaaaacaaagcataccaaaacctatgggatgcagcagaagcaggtctaagagggatgtttatagtgataaatgcctacatcagaaaagaagaaagaatccaaataaacaacctaatattacacctcaagktactataaaaagaactaactaagcctaaatctaataggaaagaaataataaagatcagaacagaaagagattacatcgaaactagaaaaacaatagaaaagatcaatggaactaagagtttgtttgttgaaatgataaacaaaattgaaaacctttagactaagaaaaaagagaaaagtcaagtggaatgagaaatgaaggaggaaacattacaacaaataccacagaaatgtaagggaccatgagactatgaacaattatatgccaaaaattggataacccagaagaaatggaaaatccctaagcatatgatacctaccaagaaaaattatggagaaacagaaaatctgaacagaccaataacaaatatggagatttgattagtaataaaaagtctcccataaaaagagttcaggacctgatggctttactgctgatcttacctaacatttaaagaaggactaatactcatccttctcaaactcttccaaaaaactgaagaagaggaatacttccacactcattttacgaggtcagcactaccgtgataccaaagctgacaaaggcactataagaaaagaaaattacaggccaaaatccctgatgaacatagatgcaaaaaccctcgaaagaataccagcagactgaattcaacagctcatgaaaaggatcattcaccacgatcaactgggatttatccctggtatgcaaggatggttcaatatatgcaactctattaatgtgatatgccacattgagggaaggataaaaaccatatatcatctcattagatgtataaaaaacatacaacaaaacacaacatcctctcataataaaaacactcaataaattagatatactgtagaagggatgtgcttcaacataataaagaccatatatgacaaactcacagataacatcatacgcaatggtgaaaagctgaaagcttttcctctaagatcaggaaccagataaggatgctaactctcgccacttctttcaacactgtattgcaaaacctagccagggcaattaggcaaaaggaagaaacaaaaggcatccaaattggaacaaaagaagttaaaattgtccctgtttgcagatgacatgatcttacatatagaatcctaaagatgccaccaaaaacactgttagagctaataaattcagtaaatttgcaggatacaaaatccacagacaaaaataaagagcatttttatacactgrgaatgaactgtctgaaaaagaaatcagataataatcccatttatagtagctcaaaaaatataaaatacttaggactccatttgcccagggagcctggagaacatgtgagagctggagggcatgtttcccgatggctgttgataaatgttcattctcgtggtctgccctgctgcttgttaatcccaacaccaggaattggttgtgtttagcttgctgcatagcagacacctctgtgtggctggatccaacctcagaggtgtgtggagctctctctgtgaaacctttggtgtcctctgaggggtgtggacacaggtatagagcatctctacttccctagctcagaggcgaatggggttgtcacctgtctccctaacccaaggactgaggttttgccggagttagccggtgtagctgacatagacagcccgcgctctacgctgttccactcctcattccaccctgatcagacaaggttgagagcataagggctcttcacacctggcctcttacagcagcatgctctgtggtgtgggaatggcaggcctgatgaggagaagctgtggaggcagggctgggacacaggatgctggtgtcagaggagggggctcagctgcctgctgtacccaggcaagagcaggtccagcctcctggggcccgcctgcaggagcagcatggatggaggaggacctgagcgctcagctctgcttgtgctggggttgggcgggagagttgaagccggcgtgggcacatccctgtccttctgaggagagtggctattgtcatttgctggtctctcctgcagccttgcattagttagcaatgcttggcctttggaatgtcttgttcaccaggagtcctggcaccttctcctgtccctwcatagcacaggatcccccagaccactcttttgtttggcccatgggaccgcgagtgcccttttcttcccacacattctgggcaggagcgcagtgaaggtcatttcacaatggcaggatacatttgcagcatggcccaaagcctgggcaygtcagaaatattgtatgttttccactgagagcaacagcaagacagatgcagggagaaaaacaaaacaaaaaacaaacaaaagctcccagggaattactgagatgacgagcgtgatgaggagggttcctgtcatcctttttgtacccagtggaggataacgtcagcatatgggcacagccgrgctcgtgggggcacaggcagactgctcaccctatgcaatctaggcaggcgscgtgtgccagccaggccaggcatattgaggcactgctgctttaaaagtccagctcaacgagctcaggcagcatgtggtagatacacatatgtagtagaagttccaaaattattgrtgatagtacattcatcgcctgcacctgctcactccattggatgcgggcagaggagctgggtgggaatgccttcctgcgggaggtgtgggtagaggggacagaggtgggatggcagggagggtcaggaataagcsgagtccgtacgccaaactatggagtgggacaggaaggggcacctgagagcctcctaaattctcattaggaagttcagaaagagtccataatttctgtcaaaaccaccgacagtggctctgcctgagctcaaattctcactcttcctattaccagagtggcactgggcaagggtttgcagagtggatctctgtctcagctttagtacctgtgaaatgggtgtgtcccagcagcacttactcatagagcatcaagagggccaagtgcattcatgtacactgactcggagagtgcctggcacacacacagtgcccagtgcccggctgacttggagagtgcccagcccacaacagtgcccagtgcctggctgactcggagagttcctggcacacaacagtgcccagtgcccaccagctgtttgtctggattctctctaaatgtaggacgctgccaatactgagtcttgtgagtccggtgcacacttggattgcacctgtgcacgacacacattggacacawaaacacacaggcaaacaagtgtgtgtgtaaacgcgcttgagagaattgaagagcatcagtccatgttggaaaatccaacgacatcgaatatagctatgaacatgtctttcaggcgttcttaaacgtgtgattgattaacgtgtgatctgatcttgatgcccgaaccctggaaatgttttaggagcaggacacagccctcctgaggaaaaggctcctacgctggctgcctttgggtttgcttctctgtgaggtggcgattctgaacgacgtggtgattctaggtctgtgctcacagtgtgttctgagacatgctgtcacccctctgcatttctggtgctcaggaggccattagggaggggctggtggctttgagtggcctgaggagtggtggtggcctgtctctgtggctgccacggcactgctgatcacctgcatgggcgtgtccactagggctgcgggtggggtgaggtccggtcattatgccattggcggccaacaccgttgatgattaaagcttccatcagggtgccgtggacatgctgtgaccccggcgggtggccacagcaaggtccctatgtccttgtcacctgcatgccattccctccaccatgggcagctgcagactccacgacgtggccagtcagagctcccgtccctgcggcaagcccctggttctactgagaagcctggttaccctctcagtggtggtctcagtggttttgctctgtctcctgccccgtcttggctacaagaggctgggctctgggacggatggcagacggtgtgaactgcagayggggcctgctcggtcactgctccctctcctcttgggggtctggggagctgcctgaggctcacagcctcggttcatttcccacataggagtttgtttacctgtgacggctgccgcctgactgaagtacttgcttggttttcttattgtggcgaatacaaaagcatggcatgaacgtaacaagaagtgttttttttcatgcgtgttgtcgaatgcgtcttcccctgacatcagcgctacctttcctcagttctcttctctcaagagtgtyttcctcctgagagctgaggcccctgcatgtgggagcacgaggagggatcagccatctgtgtccggctgctgtgcgtgtgggagcatgaggagggacgagccgtctatgtcctgctgctgcgtgggagcacgaggagggaccaccgtctgtatcccgctgctgtgtgggagcatgaggagggatgagccctctgtgtcccgctgctgtgtgtgggagcacagggagggacaagccatctgtgtccggctgctgtgtgtgtgggagcacgaggagggatcagctgtctgtccggctgctgtgtgtgggagcacgaggagggatgagccgtctgtgtctggctgctgcatgtgggagcacgaggagggatcagccgtctgtccggctgctgtgtgtggagcacsaggagggacgagccgtttgtgtctcgctgctgtgtgtgggagcacaaggagggatcagccgtctgtcctgctgctgtgctcacttcagcagtgctgtctccttcagractcaacatgccctgcagagtaagtatggctgccacagctcacaaactcagccgcagcctcgaccccgctgctctgcccgcggcttcctggctgtggacatctgagccaggccagactcctgatctgcgtctcctagacccacacacctctgacgcatggccccgcagtacttctacattcactggcaagttcccacattgtgtagtcaaagacagttgcttcattatagagtttaacaataaaatactcttttttcatcttacttttgataagctactttcccaagacagacggaaaagaccagttactcaattgttggtttttatatcttgggtttactatgctgagtgacgatttgtctgaaaatagaaaggaaaaaaaaaaaaaaaaggcagagccactcctgagacagttgggttcttagcggcaaaggaccctgttaacacaggctcagtttgacttgagttcagggcttctcaggagaggatcctgaggcctgactgtcccttctgggaacacagtgttctctaaccctagacaggaggccaggtctcttaagaggcagatttccatgcgacccaaaatgtctgggagacgatggctgggctttgagctgggagcctctggaaggagaaatggcttttgaccctgtaaatcctgctcctctggtgaccaaagtgagttatgcggggctcagagtagctgagactgttcacacctcaaaagaactagcagggtttattctggctttacccatggttgactcagacctttgtcaagaaacttcctttctaggagcatggatggggattttgggctctcctggctcctggactccttggggtttggggcgtggcaggaggtgggtgcaaagccagcaccaatgcaaagggccccaggcatgccacacacctgagcgtttgcacgggacgtggcaggaggggggtgcaaagccagcacaaatgcgcagggcmccacgcacaccacacacccgagcatttccaygcacctctgtgctcttagccagtctggatctgtgtcttcatagcagactgtgggcatatgacaatgtctcttatactgtaaagttacatgcaaatggctgtgcccatccrcttggattttggtgactatgttcttgatgaaaacacacaaagcatgcactcctggtattcctatttgcctttgttatttaggagtatgtgtatgactctactactgttttatatgcttttaaaccatacacaaaatgtatttgcttattttcatttttattttttgagacggagtcttgctctgtcacccagactggagtgcagtggcatgatcccagctcattgcaacctctgcctccccggttcaagtgattctcctgcctcactctcccaagcagctgggattataagcgcggctaacttttgtatttttagtagaggtggggttcactatgttgatcaggctggtcttgaactcctgatctcaagagatctgcccgactcggcctcccaaagtggtgggattagaggcgtgagccactgcgcccagccctcaagatttaaatggaagctgtgatgacgagcacatggctttgagcctgcaccacctctttagactctcgctagcctatgtttccagagcaccgtgtagccgtgggccggcgcagggcctggcgcctgttcacagcgtgctggttctgggcacagctgccgtgaggcctcccctcccgctttccatctttgtcatttcagtctcgggagaccttctatttctctactttagacagttgagctctctctgcaaacaacacttccattgttcaacatttgggaaaattttaaaattgataacacgttcctcagcaaaaaaggggtttaatgacggtggagaaactccacggccgcgtctctacgcagtgtcgggccgcacccgtccggctcccccaggctctctcggctcctcctttcatctcctggttctctctccatctgccctctccacccrgtatctcagggctgctatgaaaggtcttcaaagacctagtttcaaaaaacatcccctggagaggaccaattaaacgcagaaggatggtttgtgtgcagaggctgagccgtcagagtagagatgatcctgcgttcccaggtagagccgcggctcctgccctcgtcgctgtccctccctgccggtgtcagaccaaagccagcgtccttaccgacccccaggcaggctctgccggcctcccctaggcagccatggcccccgacggggttagccaccttctcatggctgctgcctctcttcgcagcttcaggccggagaggacctgctttccgattgggcccgggaaaaccagatgtgctygaaggctgtggatttaggatttggtgttccagatatggaagggacacaattcatattatgcggtctgtgaaacaatgatttgacaggccagttaaagcattagacgagtttaaactgcttgagagcaaactgctgtgtcttggtgcagtttgggggcagcggtggggcgtgggggccgccgcggggctctgtgggttcgggggcagcggtggggcgtgggggccgtccggggctctggattaagtgcacagacctcgactgtcttcacggaactaaggagacctttattttacctggcacaccgtggggtcaagtccacattgagaggtgataacgtgctagcagccctcgctcactctgggcgccttctctgcctcggtgtctgctctggccgggctcgaagagcccctcagcccgctgctgcactgtgggggcccctctctggggcttgctgaggccggagccggctccctctgcttgcggggaggtgtggagggagaagcgcggatgggagccggggctgcacacggggcttgtgggccggcgcaggttccgggtgggcacgggcttagcgggcctggcactccgtgggactggccggcacctgctgggcttgattggaggctggatcccgtgagaggactgccattccctcttccctgggtcgttggccatgatggtgggtctctgtctctttctcgcttcccctctttttctcttggttgtctgggacgagctcccattgggctgcctggagtgcccgggctaggggccacaaagtcctgcagcgagtaccagtgagaggtgaagctggctgggctgctgggagggtggggacttggagaagttttctgtctagctaaaggattgtaaatgcacccatcagtgctctgtgtctagctaaaggattgtaaatgcacaaatcagcactctgtgtctagctaaaggtttgtaaatgcaccaaccagcactctgtcaaaacggaccagttagcctctgtaaaatggaccaatcaactctctgtaaaatggaccaatcagcaggatgtaggtgcggccagatatggggataaaagcaggctgccagagccagcagcagcaaaccggttgggtcccattccacagtgtggagggtttgtttttttgctgttcacagtaagttttgctggtgctcactctttgggtcctcactacgtctgtgagctgtaacactcacctcgaaggtctgcagcttcactcctgaggccagtgagaccacaaatccaccacraggaatgaacaactccggatatgctacctttatgagctgtaacactcactgtgagggtcttcagcttcactcttgaagccatagagaccacgaacccactgggaggaatgaacaattctggaygcgctgtgtttatgagctgtgacacccactgcaaaggtctgcagcttcactcctgaagtcagggagaccatgaacccaccggaagaaagaaactcyggacacacctgaaggaacaaactctggacacaccatctttaaaaactgtaacactcaccgcgagggtccgcggcttcattcttgaagtcagcgagaccaagaacccaccaattccggacacaacatgtccatctacatcaggaagttgtgggttctgggcttattggtttgtattgattgttggtttcgagagagaatttcagtttgttgcccaaatggtgcgatctcagctcactgctaccggttcaagcaattctcctgctgcagcctcccacgtagctgggattacaggcgcccaccttcacccgcagcctcccgcgtagctgggattacaggcgcccaccttcacgtccagctgaatttttttttttttttgtattttagtagagacggggtttcatcatgttgcacaggctggtcttgggatttgaccttgtttcctcctccctggggtcagaggtcccctggcaggtggtgggtggtccctgcattcgattcccatttccctgtccactgggaagtgtattctggaaggaagttcctacatccttctggctctaggaatgttctagacatgttacgtgctgaggctggtggggcaggctcaggcctcctgcagacgcctgttttctcataggagccatacttggtccccggccaccccgggccttggatctgatgattctctgggtgtgtcagrcaaggacctggcctccctgttatgtgctggaggtcagggaggtcaggagcagggctggcacctctaactcccatcccccscttgtgtgcctggtggtcctgcccggctgagagcctttctcttagactctgccgcagccgtgatgccagacaggagaagccagggagggcatgggctgctccctgaaggcggattcctctccccaggtgggaggaggagcctctgtagctgccctgggctgctcctctttcccagggtggcctgaccacaaccccggccgggcaagggagtagggaggaccgtacagagtttctcttccccagctcattgttttggagacagayttggaggcaaggccagagctrtaygtcccagcccctgcgtgtgcacctcgtgcagcagtgtggcaaggccctgacagtgccttcaaggggtgcttctggcaggccycgggagctgtgtgatgaggaggagacttgggagagcgcgggttaggtcctggcactgtagccgcctcctcttgctgatttcaggggtcagtgttttcagggttcatctcctttatagggcagacttgagggcttcaggtacaaacgtccgtgtctccatcaggcctgggcccagcctcctccgtctggagcacattcctctgtggtcttcagcattggtgcccgtggagtggctgaagccctgactgcccgttgtggctgaggtgtgggaccgaatggcgaacagagtgggcaggaccccgaggaggctggaggccgattcgcacaggctgccgtcatctcaccgctctgacagttcttaaagcaacagtgcaagagaaatccactgcgacgtgagaagagcatgtttatgtgcacgtgtatgtgcgcgtgtgtgcgtgtgcgggcacgtgtgtgtgtgtgtgcacgtgtgtgagaggatggcttctgacgaaggggctgttcatggagctctgatcagccactcttgcccgtggggatcttgcagggtccgaccagtcagtgccccccaccccaccctgttagaggggacggagcccggtcctcaccccgctgtgggctgcctgagagtttggcttctccctccagagctgatagacagcacctgagcatatggccccctcggccccagctcacagtggcatgcctcgcaccctccgcccctgcctccactacgaggaggccgcccgcacacctggggaggcatatcctgccagctgagcgtccccaggccgacgtccttcccagccatggcatcagggccccgcagcagctggtgtcatagcacccacatccatcagcttccctggagcccctggcacagtgctgtgtgggcctggaaacgctggaagcatggtttcatccctcaggaagctggtggttaataaatggggccaagttaataaagaaggaagctaccaacaaggccatgcggtcaccacgactgcccagggccagggtgtgggggtgctgccttacagcctgtcggggccggggtgtgggggtgctgccttacagcctgtcggggccggggtgtgggggtgatacattacagcctgttggggccggggtgtgggggtgctgccttacagcctgtcggggccggggtgtggggggtgatacagcctgttggggccggggtgtgggggtgctgccttacagcctgtcggggccggggtgcgggggtgatacattacagcctgtcggggccggggtgtgggggtgctgccttacagcctgttggggccagagtgtgggggtgctaccaggaccgggatgtgggggtgctaccttacagcctgccggggccagggcaggagctgtgcttcaagggcagagaggctttccaggtggacaagggacgaacacttggggagggagggaaggttcagatggaagaggaagctgagaggagacgcacccctggaggcagctggctgaccggtgggctcccaggagactgtaggatttgtgcagataaaagtcaggcagcagagtcagagggcagccatagcacgtgtaaggcggcggggatgctgacagcaagacgttttctggagaatctgggttttactgcaaatacaaattcactgttctcaggatggcggagggaccagctccttgggaaggtcacccccttggccacctgttgtccctgaggggctgatggagggaggaggccaccttatgaactgcaccaggtccgtggctttggcggtggaggccccatcactgcaactcttcttctgggagttcggctctgcctgccacacgtggaggtgckcagggtgggggccagccctggcaaacccaccccacataacgtagtacctcgattctcaccaaagaacaaaaattacttgcgattacgtgcaattagcaattttaaattattaatggtggtgaaagaatgtgtctattcaacaagtaatttattgcaatttttgtaattgaaagtaatttctagcaattaaatcctaatttagagcattttctgggcgacgcctttattcatggggtgcacgccagttttattgttggctgctttgttccaggcactttgtccagtaaaatttgctgggtaggctctttgggaagagaaaaatagccgaactctaggcaatgtagaaaaaacagagtgggtctgccagcacagtgaagctgtggcttccctggagaggcgtgaggaggtgcgcgccttcccatggagacagccctgcagcttgttcagaggccctccgaggaagtgggcaggcacctgggccaacgtccagggagcacgtctctgtggccccgaggcgctgtccccactgtccccacagccacggtgctgtccctgctggaggctggtccaggcttggccactggcttgagctcttccccggggctcctcggcactgctgccggcccctggggacttcattgttctgtctcctctttcctggtaagaacaccctttaccctcagaaggcagctttttgaacyccacaatcagaaagtgctccctattttggggggagacaggactctgctacgccccaggagttgatctgtggtggatttgaatataaaaggcagccaggagatggtctttgtcgagatcttatccctgatgaagtctcttctttgtcaagtagcaaataaatattcggaatgaattcttcagaaacaaaatgacctgtgtttctatgtgaaatgcaaccacgttctcctccagaaagctgcagtcaggctccctgtgtgtggccacagcgtgattcctggtcatggggtgactccccccgtagggtacctgagcccctctgggccccacacctcaaatgcagatgcagtaatgtcgtcccaggcagcaggaagccacgcggcccctccacacatttccacagcgttcccaggaaggctgctgacaagctgggccgagcgcctcgggctcgtccacacacgctagatcccggagtgtgagggtgtctgtggctccccctgtgcctgcggctcccccgtgcctgtggctccccctgtgcctgcggctcctcgtgtgtctcctcctgtgtctgcggctccccgtgtctgcggctcctcccatgtctgtctgcggctccccctgtgcctgtggctccccctgtgtctgcggctccccctgtgtctgcggctccgtctgtggctccccgcgtctgtggctccccctgtgcctgcggctccttgtgtgtctcctcctgtgtctgcgtctccccctgtgtctgcggctccccgtgtctgcggctcccgtgtctgtggctcctcccatgtctgtctgcggctccccctgtgtctgcggctcctcgtgtgtctcctcctgtgtctgcggctccccctgtgtctgcggctccctgtgtctgcggctccccgtgtctgcggctcctcccatgtctgtctgcagctccccctgtgtctgcggctccccctgtgcctgcggctcctcgtgtgtctcctcctgtgtctgcggctccccctgtgtctgcggctccctgtgtctgcggctccctgtgtctgcggctcctcccatgtctgtctgcagctccccctgtgtctgcggctccccctgtgtctgcggctcctcccgcgtctgtctgcggctcctcctgcgtctgcggctcctcgtgtgtctcctcctgtgtctgcggctccccctgtgtctgcggctcccccatgcctgcggctccccctgtgtctgcggctccccgtgtctgcggctcctcccatgtctgtctgtggctccccctgtgtctgcggctccttgtgtgtctcctcctgtgtctgcagctccccctgtgtctgcggctccctgtgtctgcggctcctcccgtgtctgcggctcctcccatgtctgtctgcggctcccccatgcctgcggctccccgtgtctgcggctcctcccatgtctgtctgcggctccccctgtgcctgcggctccccctgtgtctgcggctccccgtgtctgcggctcctcccatgtctgtctgcggctccccctgtgcctgcggctccccctgtgcctgcggctccccctgcgtctgcggctcctcccgcgtctgtctgcggctcctcccgcgtctgtctgcggctcctcccgtgtctgcatccacgacgctgggacagggctgcaggcagtgcttctgcccttggttctgcatctcctggcctccccagcaggcaaggagctcacagtgtgggcttgcggtgggtgctcactggccataaacgttcggtgtcattttcaagacagagaaacagcacacgcagggccctggagaggctgcctggagctccacgtgccctgtcctaggagggttcctcccctgcgagctcactcccgaagggcactcgaatcctgcagctggggcctgagtcctctctccccttcgtcccacagccctgggtcttgtcttccttgtggctggagttgcagctacagcacagagctcttcccctttacattmtgagctgtttggaggyccatggccactttcatattccctgatgctcaataaatgatgaatgagtgaaacgagagtcccaaaccgtgggactgtcagcagagtctgcatgcaccgggctggggggcaacacagccaagccccatcagctattgactgtagcttcctcctggtcattcctgatccttccatccactcagccttcccacctctccttctgccggcggcacctccccgatggccctcacacctatgaggccctggtttcacctcactctgcagtctggtgaaagggatctggcagaygcgactgtctccatcctgagggcttatcccggcagtggcgctgagacctcccctcacctggtgctccgagatttgactctgtgaggttggctcctgcctggactcaggctttcaaccctggtgtctggggtgcaaggcaggtgggccgcgtgcggtgtctttgaggtgggctgccgttctggtagagagtgaggggatgtggaagttccatgcagactgtattttctgggcaaacctgctcagtgtttttggtaagtaatgcctaaaattcaggactctaattgaaggtatatccctacttctgactcaaaccacttgaaaaactcagtcaatagacagtgacgttgggacccaagtctttaaagctctgctgcaattctcatccttgaccgttggtaccgggcagttgcaaaaggctgagcaagtacagcccaggcagggagaccacagggcctgcccgggccccggagamgcggctctccgaagacaagacrtcccggggggctgtttttccatttggaccagttccacttggcttgagatgggcttcactctagaccctcctctgccagctcagcacgaagtgtgcatagtcacctgatggcaccctgtgrtcaytttcacgttgtaggaggaaaaatcgttttaaaattggcttaaatgaggagggaacaacctgacygtcttttgayggtgcagcttttaaccctaaaagaatgtcaaacgaattcatttttgtatataaktacaaattacttattagtcacaattgccatagcgactgaaggtttgtgtccgcctaccccacgcctccagttcctacatggaaatcctcacccaaggccatggtgttaggggcctttgcaaggcgctgaggccctgaggaagagcctcacggatgggctaatgcgcttctgaaagaggcctcaggacgcttcttcaccccttctgctgtgagatgacaggggaaggcccaaccaaaaagtgggcgctcaccgacaccgaatctgtgggtatctccagaactgtgagaaagaaacctctgttgtttatcaattacccaagctatggtattttcttatagcagcctgcatgggctgagacacctatcaagtgagttattaacgtttattaaaatttggcacaaactaaaagccagcagtgtctgcagagaagctggattgccccatggggcttggctgtgttgcccccgtcccgtgcatgtggactctgctgagagtcccacagttttgggaaggaccctgatgaattgtgaccattggtattgcttagcgttgattgtggcttttcattataaattatgtaattgaatactttaatgataagttgtggctagtccagcttcaacagtatggatctgccgattgtcggatattcagttaattatgcagtgtgtggagaggatatatgtgcatcaaaagcatttaatccaagaattccagtgactgggtgtcatttggtgttttgcggctgaccgctgcattcacaacacaagagaagcagcacgtgacctctcctggccacccactagagtcgaattttgtttccatcccacagttactccctctggcacaccccaggtggagggggtggtccaggtggagggggcagcccaggtggagggggtcgtccaggtggagggggtggcccaggttggggggaggcccaggtggagggggccgtccaggtggaggggtggtccaggtggatggggaggcccaggtggagggggtggtccaggtggaggggtggtccaggtgggggggtggtccaggtggggggggtggtccaggtggggggggtggtccaggtggagggggtcatccaggtggagggggcggtccaggtgggggggcggtccaggtgagggggtcatccaggtggagggggcggtccaggtgagggggtggtccaggtggaggggtggtccaggtggacggggtggtccaggtggagaagacggctcaggtagagaaggcaccccagggagaggggcagcccagtagaggggtggcccagcaagctcccagggagagggacagccaggtaaaggggttggcccttctgcagctaacagtggtcgaaaccttcccttattactgccctgaaaggactcagtttcccctggggtgttcagccctcaattgtgatagcagcacccactgcagggggcctggcctggtcataggcagagggagccagggggtcgggggcacgttatggccagtgagtgaggctcatctgtctccggtaggatcaccctctgtgaaggtagcagcttgcaccttgttgaccagtcaccagtgacatggagtggggccaaggaggcgtcctcaccccgagaaccatgcctgtgctcccagtgcccccgcctggctcccgctctgcacctataaagctggcctttgtgctggcccttctgccttctggccatgacttgccttgctgacctgcccttggccggtggagccttccaggcagcctctgcccacggggctctccaggccctgagtcactgctggcctgaccagttcaggtgtcctggcttttgctgtggggcgtctgtcctgggtctcctgatggtccagctctgggctcccctccacagtgagcagcccctcctgcaaaagctctggttggggcacatccaaggtcagaagaggcagattgcaggtcaggcagagagtggacgggcaactgctgggactctgtctctgctgttctctggctatctctgtctctgattctttctctctgtctccctgtgtctctctatctctgtctctctgtttctctgtctctatgtctctgtctctctgtctctctctgtctctttctgtctctctctgtctctgtgtctccgactccctatccctctgtctctttctatctctgtctctgtccctctcctgctccctttgtctctctctctgtctctgttcctctgtctctgtctcyctctgtctctgtctctctgtttctgtctcttggtcccagccgkcagctgactttgctgtcctcctgggccctggcagaaccacctggcaggctcccgtcctgtgccatcctggacccttcaccattgttcctactctggctcagagcactttcttcttgaagcatcctttacccaccccagggacttgaaaactggatttgaaaatgccaaatagttttaaaattagagctgcagaatgtcttccccagagcccagacttcccaggtgtctgggaagcaaagacagccagcctgggctgcaggtatgccccggggactgggcacaggatggcagctgctcacatttattggcagcaaaggtcaaagcagaaaccaggtgtgatgacggggatggccgcgcctcctgaggctggtgtttgggcctttctgcaccaggcatggccttggcattcagggttacactgctaggtgagggccgtctccttgttctccttccatagatgaggagacgaggtttggcgatgggagggagcatctggggcggggtcgggcaggggctcctaggaggcccctttggggcattttccctgaaggccactccaacagaaggtgggggtgaccggaggcaacagtggcgactcctgaggggccttggagctcctcctgtgctcctccgttcaaagttgggcagcagccgccacgtccttcctagaaaacaaagccggggaggttcagtgtgtgcgttcaaaaagctgcgattttcaggcccggcaacggctttcaacaacaatgtggctgcgatatttcacacccgccctgtgtgcacgcggctgggatatttcacaccccactctgtgtgcgtgcggctgggatatttcacacccgccctgtgtgygtgcggctgggatatttcacacccrccctgtgtgcgtgcggctgggatatttcacacccgccctgtgtgtgtgcggctgggatatttcacacccgccctgtgtgcggctgggctgggatatttcacaccctctctgtgtgcggctgggctgggatatttcacaccctctctgtgtgcacacggctgggatatttcacacccgccctgtgtgtgtgcggctgggatatttcacacccgccctgtgtgcstgcggctgggatattwcacacccgccctgtgtgcgtgcggctgggatattwcacacccgccctgtktgcgtgyggctgggatatttcacacccrccctgtttgtggctgggctgggatatttcacacccaccctgtgtgtgtgcagctgggatatttcacacctgccctgtgtgcatgcggctgggatattacacactcgccctgtgtgcgtgcggctgggatatttcacaccccactctgtgtgcgtgcagctgggatatttcacacccgccctgtgtgcgtgcggctgggatatttcacacccgccccgtgtgcacgcgtctgggctgggatatttcacaccccgctctgtgtgtgtgcggctgggatatctcacaccccgctctgtgtgcgtgcggccgcggctctgatgcttttgcaggcggcattgtgtcactgattcacttaggggctctctaattagctggcggctcaatgagctgtgattgcaggtgagacacagacttgttgacggtgctgaggatctcgtgccttgaagagcgctcaaatgggctgtcacaccacgagggtgaaacagttacccaaatacagtcactggggcagcatctctgtgcacataacccagtgtgcgtttaaatggcaagctgggaagagtcaactgcatcagcttctctctaaattacgggctggaggtggcagggaggtgaggtgaaggaggtaggaaacagtgttcctaagtccgtggtcacagctggtcacgtggagagatgcccagagctcttgctgtagagtcaggaagaacagaagctcagcctggcatagaggttgggttttttgctgcccttggtttgtacacagcactaaaaatgtttctgagtttaatctacttaaatgatggaaggatatgagagaggtgagagagaaggcctgcagaagcttaggctgtgcccacaacggctctaaccaggagctctcaggggygaggggcaggcccccaggccacggtgatcccgctcagatgctcagtcacccccgtgtaagggttcccactgccacctccttgaggtggaaggtggggtgtggagcccacgtccatcatctccctgaattcctatcgctttgacacctggaattcctctgtgctgcaggcagggtctgggcgttgtccacaatcaacactcacacaaaaacatgctccctggcttccaggcggctccagatggagagagcacacaccctccccagtgtcccttctaacaaggttgctgtgagcaccacgcccccggggttccccgcgggaaccagctctgccgggccagccggtcaactccagcacccagcacccatcatcccgtgtgctcacagtgcctcgctgctcggctaacaagcaggttggcaggtcccttttcctgactggctccttcctgattaagcagcttttaaaattccacgcaaagtgtcaacatttctagatctcttaaatgcaagagcttcccgagtgccaggcgggacctgccgcgggtgtggggctgtctgaggtgccagtcactggasasgacgctgcagatgaggcacctcccctgcagcttccccgccctttagtgacacggaaagtggaagccasacatcttggatgyagacgtgggagggagctggggtggaggcagctgggccaccccaccacccctgaaggccggccccacagcggcatctgaaccaccagccagggccactggagcccactttcctgtttgtgcagccaatggatgaagttttaaaaatttggcatatttgaaytccattttttaatggggtcaggcaatgtactttgaattatttatcagactgaattcaatcttcaaaaattacagaactctcatctctctgcccaggttaaagccgggaagtggctctcgtctctctgcccaggttaagccgggaagtggccgttgtgcctgtcctgaggccgctgctgctgggtccctctgtcaggctgttcctcagttcacggaattcaggcctgatgctcacagccacactggccccggctctttctgccagacatcacaccgcagcagacaccgtccccagcctcactgccagacatcacacygcagcggacaccgtccccagcttcactgccagacaacaccccgcagcagacaccatccccagcctcactgccagacaataccccgcagcagacaccgtccccagcctcactgccagacaataccccgcagcagacgccgtccccagcctcactgccagacaataccccgcagcagacgccgtccccagcctcactgccagacaataccccgcagcagacgccgtccccagcctcactgccagacaataccccgcagcagacgccgtccccagcctcactgccagacaataccccgcagcagacgccgtccccagcctcactgccagacaataccccgcagcagacgccgtccccagcctcactgccagacaataccccgcagcagacgccgtccccagcctcactgccagacaataccccgcagcagacgccgtccccagcctcactgccagacatcacaccgcagcagacactgtccccactggtcctccagaccaggggtccccaacccctggggaggcraaggagccctgcgcctctgtggggtctgagcatgctagagagagaagctgggcaaacagatggggtggacgcagcccccacgcagactctgattctgtgttccatggcggggctctgtgggcctccacccaaaggcagggctgaagctcctgctgatggggagccaggcggcctctggccaccgcctttgatgtgtgcctggaccatgtcctcatggtgcctctgctcattcatttccagctgtactcatcaaatgccacgctgtgtacccggggctgtgctgctgggcagcctcacacagttctgccaggcctcctgctgaggcacttctctgagggctggtgatagactgatgatggcaccaggtgatcccttcacccagagtctgggaccaaacagaaatgtgcagagggcagcctggcaagggggctgtgcagagggtggacatggggggatatatgcacctgtgggtgggtgcctgcaggtgggtgcctacctccaggtgtgtcccgtcggtgtgtacctgcctgcaggtgtgcccacaggtgtgtgcccacaggtgtgtgcccgcaggtgggtgcctgcctgcaagtatgtgcccataggtatgtamctgcctgcaggtgtgcatccacaagtgtgcccctgcaggtgtgtgcctgcaggtatgtgctcgtgtctgtgtcaggggcctctggggaccactctgagccacatgggggtgtttccagcaccaggagcatagtggatggcaggtggggagccaggtcagtgggaggccactaccgagaggccttgctagtttctgagcaagtcactgctccaccgggccaggggcctgcggaacacatacgaagcatgcactaccttgggggctgggaggtagcctacctggagcagatagaaagtgacctgggggaatgtcaccaggcttgggggctgtggggcctggagtaggagagcccatggccaggagggctgttgtgaacaggcggacctcgactgctctagcaggtgagggtcagggggctcttcgtgtaaaggcagaaaagggagggaagaggaggaggaccccaaaactccatgggacagctcctcccgggcatcaaggaaagtgccagcaaggaccagggaccccacgtgagaagcagcatcgctgttctggaaccctaccaggaacaagaaggtgcaagctggcttttcggaatggggcagttttcagtgcacacttgaggcagtcctggagcctgggcatggaggaagagcattaggagagagcccacggctcccggctcccggcctttggtccccgcaagggacctgagaccatttggagtctcgaggtgaatctggggcagtgagtctcttcctagactgttgcaagggccatctcgatggtccccactgtcacctgctgccaccggctgctgcaggtacccatgcacatgtcacgtgtggcccatggcgatctgtcgtatggacaggagtgtggcttaggcggtgaacttcaggctgtgtgtgtccagcatgtaggaagagctcagcacgatctttggaccgtgtgtgtccagcacgcaggaagagctcagcaaactgccctgggaagctaccttcactccacggtgctttgagtggtaaatgattgtctaacttgagatgtcagtgtgccagcgtctcagtgcagttccatctggatatgtattttatttcccctactgaattgcatggttttatttctaccacgacattttcaggcggtcgttaccaactctaaacagaggctcattctgcctgacgcgctgctgcggctgttcgttagggacaatgttatcagcaagccttgactagaaggtgaggaggcttggactttcaccatgtgacctccttctaaataataaccgtttgccgctccaaagtcctgcactggaagatgaaggtgggaagcgtgagagtggcaggggtagagttggacttgaatttagggagcccagtggctctagatgaagttggtcagctggcccacatcaccgtggagtttgctgagtgacgcgggtgttcagccacctccgctgggtgcagggtgtgctagggaggtgctgctctctggctcggccgtcattgcagccttgctttcacattttcaagtgcctctcactcagtgtcccatgcagggaggtgtccacaactggcaggaggttctccccaggtgccacgggtgctttggaggggtccctggtgggaaaagggccgttgaggtgctgggcgcccacccatggctgtgccttccccttagccagcaggccacagaagccaggagctggaatgcccgggagaggaatttggaagtagaccctcacccagcacccagaggctctgtggcagagcgatgggaaatacacaaacaacggtggggcaaagtcctccagagcaagctgagcagatgctgatgggcctgccccaaacccaggcagcatggggtgaggaagcccctcctgtgggatgcggtcgggagaagatggctgtgtgtgtgtgcctgtgtgtgtgtgcatgtgtttgtgcattgtggatgaatgtggatgtgcacgtgtgtgtacagtgtgcatgtgtgtgctcatatgtgtacacatgtacatgtgcagtaggtacagctgtgtgtacacccacacacggtgtgcacatgtgactgtgagtgcaacacgtgcagtgcatgcacaagtgtgtaaatgcatgcatacagtaggcacatgcgggtgcacacaggtaccgcatgtgcagtgtgtgtgaatgtgtgtgcagtgtgtgtgaatgtgtgactgtgtgcagtgtgtgaatgtgtgtatatgtgtattgagtgtgtgtgcagtgtgtgaatgtgtgtggtgtgtgtgatgtgtgtgtgcaatgtgaatgtatatgtgcattttgtgaatatgtatgtgtgcactgtgtgtgaatgtgtgtgtgcaatgtgtgtgaatctgtatgtgtgcagtgtgtgaatgtgtgtatgtgtgtgaatgtgtgtgtgcagtgtgtgaatgtgtgtgcagtgtgaatgtttgcagtgtgtgtgaatgtatgtgtgtgcagtgtgtgaatgtgtgtgaatgtatgtatgtgtgtgtagtgtgtgaatgtgtgcagtgtgaatgtgtgtagtgtgtgaatgtgtatgtgtgtagtgtgtgtgaatgtgtgtgtgcagtgtgtgtatatgtgcagtgtgtgaatgtatgtgtgcgcaatgtgtgtgaatctgtgcagtgtgtgtgaatgtgtgtatgtgtgaatgtgcgtgcagtgtgtcagtgtgtgcagtgaatgtttgcagtgtgaatgtatgtgtgtgtgcagtgtgtgtgaatgtgtgtgaatgtgtgtgctgtgtgtgaatgtgtgtgtagtgtgtgcagtgtgtgaatgtgtgtatgtgtgcagtgtgtgaatgtgtgtgcagtgtgtgtgcatgtatgtgtgtgcagcgtgaatgtttgcagtgtgtgaatctgcgtgtgcagtgtgtgtgaatgtgtgtatgtgtgtgaatgtatgtatgtgtgtgtgcagtgtgtgtgaatgtgtgtatgtgtgtgcagtgaatgtttgcagtgtgtgtgaatatgtgtgcagtgtgtgtgaatgtgtgtgcagtgtgtgaatgtgtgtgcrgtgtgtgtgaatgtgtgtatatgtgttgcagtgtgcatctgtgagtgtgagtgcctgtgtgtccatgcaagtgtgtatgcttgtgtctgtgtttacatcaggaaagcaggggagggaggcaggagtgaaccggggaggcctcagactttggggcagtcactgtggcctcgagggtgtgacccttaacatcccctgctggacgtaggagctcttcgtgctctgggaaccgtaggtggcctccgtgctgcagccactggcacctgggaaccaggggctcagggcggctgtggcmcctcctgttgtcacagtcaccgcgggaggaggggcagaagtacggcgcagccaccacgggctttagggccaagtgagctcctagattcctccctcctgagcactaactgtgtggggaattagcttctcctgaaataacgggaagccccgtcagaatattcgaaatgcaacagacacaggtttcctaaaatcgtccgtagtgcctggagctcaggttctgagggtggctcatggcggtgccctgaagaggcttctgcatggcgtcttccacagagctgctgtgtcctggcggtgtgcatgcccagacagggacccatgtgtgctggggggagcctgcggtcccggagtgcaccctgctgttttatcctcttcgtgtgctctatggagtggacgtccacattctggctcaggatgggtggctggagtcccccaggcaccaagcctctgtctctaactggcaggggagccatcccttcccttctcacctgtgcaggacagggctcagtttgcagggagtcgctgggccctgaagcccttccttggcccatcgctgcctgtgagcccctgaggcttgggctgggtccctgccaggatcacacagttgggaatctggggaagggattgtgtctcacaagttcgtgtgctttattatttcycaggggctgttacctccctccccctgactccttgccctgtccaagctccatgtggcctggtgctcccatctttccgggagcctcttcccgctgcccggcctgcttgtctgcatgcaggccgaccctggcctctgccacctgctctctgagctgcccgtaggcagggtcttccaccttccaccatgtcctggggtgcgctgggaaagagctcgggatgggcactgttgctgacgctgacacagactcagccagtcggagcctcacgccccccttgctggataccccaggtcccatcacagtgcagcttctcagaggagtcactgtatctattgtgcccagacctcctacaagtggctctgagggctgagctgaccctggagggacaggccccctcctgcccgtctgcctcctctctcctcccctgtctctcctgagacattaggagctcacactcctgcctgaggacctgccagagtggcagggcatgctgggtcccggcctgtgcgactgatcagctttctctcctggcttctgggtcaggaggaaggagccgtctctgccagtcttccccttgtgtaggcgtggcagcgagggtgttttctggaaatgccagcctgaggcttggggtcttgccatcttcagccccacggagcgctagtggcaacagccagtttgtgtttgtgtgtgggtgtgttatgtggacggggattttaaccttactatcagcattagaatgtccgtaggataaatgtcatggttgttttgcttttgttttggggtattgtgggagtgcatactttggattctataggccctctgggctttattcaaatagactctttttctaggccttctgaaaaagtcgtatccggttgtgtctctgcttctgttaaccatgatttatgaatgcatgcattactatacattactgacaaattatttataaagcaaacttttgtgtataaagtcttatttccccatggaattatttaataacatttgagctgtgtgctgagaaggtgtttttgcaggcactgatatgaaagcttttgtcaagctagctgacttgggaaggcagcctagggcggcatcctggcctgagagtcctcagcattgctaattggctttgctttgtcgtgttttaggcagcctggtgactgtactgatgtgcttctccaaaccccacagagagacagcaggcatcttgtctgctaggcatgcaggcgttctggttctcatgtgcagaatatgcacacagacgtgcacgcacatacacacaaatatgtgcatgcacacacatgtacacacaaacgcacatacatgtacaccagggacacatggacacacaaacacattcacatatgtgtacacaaagggacacgtggacaaatacgtgtataccagagacacatggacacaaacacatgcacatatgtgtactcatggacacatggacacacaaacacacatacctgtacacccgggacacaaggacacacaaacacatgcatatatacatgtacacacagggacacatggacacagccatgctgctccctggtgaggagtgggagcaggtgggatccccgggaagagtgagtcccactcttgggctcttgttataaatccacctttggcagacacgccctcctctaatttcccaaggaacatgccagccgttggtgccgacggtctttggtggagcctccagagcctcctttaggcttttcccaggggctctgaggggtgtctgtgatgtcactcttccctgcagcacagcagcagctgcgggttgtgacgtgggatgagaggccgcttgccctgcccggaagggtggctctgtgccctgcatgggccacctgcttccctggctcttctccgtgtcctgcgtggcctgcctgctcccatggcccttctctgtggcctgtgcctgtggccctttagcattgtgttggttatcaagctgccatttgtcatttatttgtgcatctgccttgagcaaccttccacttccggtgtctagaagttctgctccttgtcactccatttggaaactgagctctcactcaagagacgtttgcagcatcaggcagcagaggcatcaggggtcctcacggggacatgcacgaggggtttcacaggcgttgctggtgctgctgcctcaacccgtcctgctcctgcttcctgcctccctgtaccgacgctgcacctccctcaccccactctggatcctttagttgaaatcaactcttccacattcgtctcctagccggtgtgtctacccagcacgaccacgcagtgcaggcctcgtggacagacctcgcgtggctgcaggagacttctggcttcctgggaccttgtgaaaccagatccccaaaygttcctccctaaagcttaacaatatgaacaacaaataggccaaaacaaacagatacagaagcaacaaggaaaaccctggatgccattccagcagagccaayrgctggtggttgctgaaaaagcaagagaatccaccttccaggaaaggcttcagggaaggccctgaaatctctgaaatctcccccaaagctgtgactggggggcaggggaggagmcacagacccttccacagaggtggtatctgatgtggtcgcccccatcctaccagaggctggatgcagaggatcagcagggcggccacccaggcagctccctccgtggagaagcacatgcacatggagtgcgtactcacagggtcgtctcgcggcgattcatagaaatttaaattaaatgcagacaacagaaaagacaagaacttaagaactggagcaggaaggaggctgatgatagcagagtgtgagacgcaccagagccctttccacgccagtcgcgcagggcaggggctgcasgtggagatgccgggggaggcgtcagcggctgattcaggacggcctgtgttcaccctggagcaggctctgcagcagacagagcggaggaaatgtggtgtgtggacgtcgggaatgctccaggagaaatcccaggtgagaaggagccggggcagccatgctgtgagctgttcttacgtgcccgcttgragattagttctatttgggtctcttaaactgtcaggctcccgcccagttatcttacctgaagcagagtaggattcaggctgcaaagtgaaaactgcctctcaagaaagccttaggtaaaaaagaatggatagaaggtagctatgatgagacccatcccactctcagctcatgtgatgagctgaggcagcgctcagaggaagagctgctgtcaccgcgaagccagggtactgtcagctgacagcaaggagcccagcaggggagggcatgggctgtggccctcaccagctcctctgcaggcgggctcacccctggcacgcacgccatccctgtgattctcatcatcagggcagttccaggtcagcgccgtggggctgggcgggggcrgtcaccgccgcaggtcttggtcagtcctccaggagcggagctgcagggttggatcctttgtacagtgggtgagacccaggctgagcgaagtgggcttgaagcctgggggctcagacatttctcgctgctgcacgcttgctcacccaactgggggctcggggtcgtccagcaccacagtcctctyatcctatgattcccagagcttgagggcccmccagaaggaagagcagagttccagattgaatacaggatgcctgactggattcgaatgtcagagtaacaagaaaaagacgtttagcgcacgtacagcaggtcctcaaatcacgccatctcattgtaaygctgaggagaaaagaatcagccaaatctgggaygtagactctctgaacatttggttcctgtgtaagtttttaatttaaaggaaggatcctaccccagaaacacgccacaggtttctgtgatcaaacctgaggggtcgggttccgcgtctgactgcgtcctgagcagccgtgtgcccgggtctctccacacgctggtccagggcaaaccccgcctgctgacctgggtggtagacagaggatactcgaaacctctttgagcatgattctggttgtccgggtccctcattcaactccatttcaacccagatcccagggaaagcagggatctgactgggctctcagtctgccttagcaggttgtctcatgcctgttccagggaactaggggtccggaatttacaggggatcttctgaaacccaagctcccagacggcaaaaagctggtagcttgaaggaccttattcctcgttttggcagaataaactcacatccatgtttctttttgcataagtttaggttatagatagatttgattattccacaatttcttagagactatattttttgggaaaaatactcttttctactccaagaaagataaattttattacagatggtgaatcattccataaacttcctattagggctgagtttaattttaarctcgggcaaattctattgctctcaagccaccagggtagtgcatggttgtccaacatggagcttctgctgggcgcccagctgctygagtcctgccctcttctctgccgtcatcacttgtcctcacgggagctgcctaggttcccccccgcccccgccagcttctgtctcctccaccacctttcctcaggtacctgaaccaataggtaggtcttccggggccttagtgtatttctaaaactgccaatggtccaccatctaaaactttttaaaattccacatggcgcggaccagaataatggccctgcacttgtgactggctggtgaccttgctccaagggtgcacgtgacaactcctctcagagtgaggagaagcctcggtgccctcttgtccccctcagcagaggcagccgcggggtccctgccacgtccactttcctcagccagtcggcatcagactctgagtcccaagaggtcagtccattgtgtgggggacagagcttggtccaaagctgtgcctatgggagacaacagaagaggaccatcaaagcatcgtcgtcaacactccctgcccacatcacctttgcacagagattctgcaggcaggcctcccccgaaggtcctgcagtagacacgggacatccctggatgagacagaacacacagcacctgcagggttctgatcacggcatccaaaatcaaaccygctgagaagctggagtcagcactggctctcccagcaaggggtttcctgtggcatctaagtctgaggacagaggtagttctgaggctgggtagttctgagcatcgtctggtttagaaggttttgctcagtgggtccagctggaacaggcagagaaaggtagtcaggcagtgaggacgggtgccctgaggcttagtgccaagccccagggacaggagggcccattggcctcatcagctggcgagcccagggcagccagaaaagagtggccaggagcttggtgcatggggtgggagggtgggtcagggcccastgcaagggtgcggcggacagcacagccccagcgggaatggagtcctcgaaactgtgagactcatagtttggtaaaaacatttccaaagcatcctgaatggacagagggctcaacacccctcactccacaaaaagctacatgattgtgtaattctctgtacacacatactgtcctctgcagttccccaaatccgtgaaccacttttaatcctgaagctgtcgtgctgaggcaagttcaggttaaatttcagcaaggtggttcggccgcggatctttggtggtggagtggccgatsctcttgttccccacaggaaggcagcattccctgttccctgtggccgtggactcctgccctgggcctactttcttccagagcccggcccctggaggctgaaccaggccttttggtttcctctgtggtgtgatttgagagatgcttgtagaaacggtcagataagccccaaacatcttcctcagctgtgctcgcgtgaagtcttgcccttggtgatcttgttgggtagatcattgccttgtctgggtctttagccaaagaacctcccttgctcacacgtcgtgaagcctgcaggggcttctgcgagggagcttttgggttgctctgtgtcactcaacaccagaagacaggaacctctatacaaagaacaggtcctggacgtgggtgagcagagaagggatgtcctaggaaagacagcaggggagggacatgaatttctccttttctgcagcttcttcctgggcctgggccatgcctcaggattttccctgtaacaccatgcttcgcatttattattcgtgtccagatctattttgctatagaaagtagacatgtctaagaagtaaactgcaggatgagaaagtttaaataatttgtttcttcaggtgcaaagatgactgtcgtagtttcctgtcctgtagggaggtgaaactcatgccctctgctcctgaacgcagagagggagggctgtacatttttactgctgtgtgcagcggtggctctgtgccactgtccagttacagggatgctcctgaacgtggagatggagggcgggtcgtgccgtgggcagtggctctgtgccactgtgcagttacagggatgcttcctctgctcgataaatatggatgccagcggctcgagaatctgttgcccagctcgacttctgcgagcctgctcttaaaaagagttattccgctcttctaatgaatcattttctcaatttccttcctcaccattagagtatttttaaagcactggacaccttgttattcaaggaagtccccagtcttgcctcgcctgtgtgccgcattctgcagattctcatggaagactcaaggccaacctgaccaccgccgaggggaggggacagattcctgtggggcgyggtcctggcctgggtttcgggagtctggcgtgtgctctggagacccggggctgcccctgccctagatggttttgcagtgggttccttgtggaagcaacaggcgcggcaatcacccggtgactggaaacggaaggttctgttgagtgcttcctcctttctacgaaaygcagcataaaacacttctgtgaaaggagcacgttgttaaaagaaacacrcgaaagtgtatttaatgggcagagccccgcccgctgtgctggccccggtcagtcctcgagtcctcaggcccccgcccgctgtgctggccccggtcagtcctccagtcctcaggcagcttcagttatgcacatccaggctcagtcgcctggaaaatgagactggcccaggtagatctggtggatctgccagtttattrgaagaaaaggctcatgtatttatttaagtcctcccagcattagtgcttgacacatatttaaagcacttggctaaaaaacagattggaactgtggttgggtttggtctggacaacgaggtctggtccggggaaaccacaccctccgcatgccagcctcagttctgagtgccgtgggcatgacaggaggaacctcgggccacagggactctcactcygccagcccaagggtgagggaagattaaggtctcctttgagaaaccaggctctgctttgtgatatggggtcgttttccggcatgttratctccccatcaatcgggggtggtgggggtggctcatgttggggaggattggatttggggagtgagaggttcgttctctggctttgcatgtgatgcggctgattgtcgggatgtgctgtgtgattttgctgcttggactcgatctaactgggctgtcagcctcctccttgggcttcagcactggggtgcctgtcacgcgtctgtgcagctggcgtggtggcttccctgaaagccaggtgcctggagatggggtggtggggccttcctaccctgtcctgtcctgccatcctttggagaaacgtgtctcttgtttgtctttggtaactggtgcagggctggggctgggggktagtgagggatagggctccgggctatcaggtccgcctggagtgctcaccaacccacacactaattcaggagcagtatgcttgggtctgcctgcctagaaaggctccattcccgctgcccagttggccgccttcatctgagccatccgaacggtgacaccactcaccaccctgggcacggggatgattccatttttcctccaagtaattggcactgagagattatgggagtggtgtggcaggagcttctgcgactgctctgattctcgccgcagaggtgatggggacgaggcagagttgtcaggccactggtgctcaagtgctctcgcgttcccacccactccragcagctgaggcttgaggctgtgyggcaaccagagcagagttgccatggcaactggagaggcaggctgcttaggcgaaggatggatggagggaccaactttgtgtttctggtaaaatgggcgtgtcccacagacgatgaggaggccagagccaagaaggggctttgctgggacctgccctgagcctggggcaggtatgtggtggctctcgtttccctgacctccccttagggagccctgcttgtgtgtccccaacaatggaatggaggcttcaagtcacaggtccagttttacagcgtttcaggatttgcacacttactgtgctgagcrtactctgggctttattaaggtgtgtgtctgtgctctatacgcatgtgaggtaatgagggggacacacacatgcatacgtgcaccatatacatccattgcacacctgtgcacaccacacgtgcaccatagacatccattgcacacctgcacacaccacacgtgcaccatagacatccattgcacacctgtgcacaccacaygtgcaccatagacatccattgcacacctgcacacgccccacatgcaccatagacatccattgcacacctgcacacaccccacaggcaccatagacatccattgcacaccccccacatgcaccatatacatccattgcacacctgcacacaccacacgtgcaccatatacatccattgcacacctgcacacaccccacatgcaccatatacatccattgcacacctgcacacgccccacatgcactgtatacatccattgcacacctgcacacgccccacatgcacacataccgcatgcacatgtatcatatccgtgcagtaaggaggacatctgatctctgctgggagaaaggcgaggttctcctcggctcaccaatgagggttccaaagcaccccagggacctcagcaggcaggacgggagcccagttctttgaccctgagcacttgttcccattctcctgaagatgagcrcattattaccgtcatgctgtgtggttcttgagagcctgctaagtaacagtacgctttgtgcgtgtcccattaccctttctatgcattaggatttcatgccagcctagatagggaattgtctcctagagtctactttatgtgatttccaccgagatttccagggggctttaacttccgtacttgttacaatcaagtaaaaatgtgctcatctcactgtgcgtaatttcaccttttttcttttggaaaatttccccacaaacactttaagaataagcgaattgttaattttttctctaccagatagcaaagcatctggaattgtcttttgtggcaacatggttaggaggacacatttatgactggttgaaaatgatatgaaatagtgatagcacagtgctgctaagagtcagctgatgttgatttgaaggaatcaggactayggcgcaacattcaaacatgttttgcatcacgtcaaaaaacagacgagagagaaaccacaacaattcgggggtttgagattttgcaaagaaaatatacctstcttataaaaatcgttgttttctatcacttctgtttctgtgtggatgtgggggggatgtgtgtgtacgtgtgtgtgtgcatatgtatggaatgtgtgtgtacatgggtgtgtacatgtatgcagaaaagcaaaacctgagtctgggttaagagcagatggagaggggatgaggatggggaggccggttcccttttgctgttctgtgcaatttctgccttgttttgrtaccatttcaattttcttaaataggcatgcattatgctataaatgtataacaataaataacctatatgcattagaaagaatctgaaaattatrcaacagtaggaatgagagaatatccacattcatacatcctaaaaatgagggcttaagtgtcctactttatctgagctcaggttagaggcagggaccaccccatagatccgattgtgggtcctgttgttcggctttccttgatagtataagtattttctttattataatatttccataaatatgtgaagcatttagagctgatgtaccatacttcaacaattcatctgttgctttttactttggtaagagtagaccataaatgcatctgagtgtcaagtgtaggaaactcgtgtgtgtgttgtgcatccactgagtgtccagtgtgggaaactcgtgtgtgtgtcgtgcatccaacacgtgttctctcacttgcattacactcagatgcatttatgacacaatgacactgcacgggtcgttgtgcacacacactgggggagggacgtggcgtcttgctggagcacaggagaagcagtttaaatgggaatgcattcagtgcatgtctgtcaaagttatgagtgaatgatgcttggcaatgatgtcacagagggcatctgaccgctgagataaagccctctgcagtccccaggggatggggcttttctggtcctaaagcctcactgaccataggaaacccctcttccacattttattggctgcatagacgtcacaactgggagactcatcagccaatccaactcacaggtatggtgcatgtgtgtgatgcgtgtgcatgcagggtgtgtgtgtgcaggtgtggtagatatgtgtatgtatgcatgtatggtgtgcatgtgtgtgatgcatgtgcatgcagggtgtgtgtgtgcaggtgtggtagatatgtgtatgtatgcatgtatgtatggtgtgcatgtgtgtgatgcgtgtgcatgcagggtgtgtgcgtgcaggtgtggtagatatgtgtatgtatgtatgcatgtatgtatggtgtgcatgtgtgtgatgtgtgtgcatgcagggtgtgtgcatgcaggtgtggtagatatgcatatgtatgcatgtgtgtatggtgtgcatgtgtgtgatgcgtgtgcatgcaggatgtgtggtagatacgtgtatgtatgcatttatgtatggtgtgcatgtgtgtgatgtgtgttcgtgtgtgtgctgtgtgcacgtgtgtggtgatatgaatatgtgattcacgtgtggtgtgtgtggcatgttcatgtgtgtgtgtgatgtgtgcatatgtgtggtgtgtgtggtgtatgtgtgtgatgtgggtgcacgtgtgtggcatgtgtgcacgtgtgtttatgtatgcacatatgtgctgcatgtgtgatgtgtgcatatgtgtggtgtgcacgtgtatgtgcatgtatgtgatgtgggtgcatgtgtgtggcatgtgtgcactgtgtggtgtatatatgcacatatgtgctgcgtgtgatgcgtgcatatgtgtggtgtgtgcatgtgtatgtgcatgtatgtgacgtgggtgcatgcgtgtggcatgtgtgcacgtgtgtcatctatatgcacatatgtgatgtgtgcgatgtgcacatatgtgtgatgtgtgtgcgtgtgtaggggcatgcatgtgatgtgggtgcatgtgtgtggcgtgtgtgcacgtgtgtggtgtatatatgcacatatgtgctgtgtgggtgtgatgtgtgcatatgtgtggtgtgtgtgcgtgtgtatgtgcatgtatgtgatgtgggtccgtgtgtggcatgtgtgcactgtgtggtgtatatatgcacatatgtgataygtgtgcatggggtgtgtgtgggagtgttttgttttgttcagtcctacacagtattttgaaaattttgaatttattgcaaacattttaagatttgaattcaagtaaatgagaaacaagcttcctggcctcagttccttcagggaaacactggctgccccttgggagggctgtgtccccacgtggtcggggtaccccactccttcctggctgcatcttggggtacgcaggtgcttgctgcatagctggcagctcagcggcttcttacaggagagctgggagaaaagcaaaggcttttctcctctgacatttgcctccagcccgatggtttgagtgtcaagacggaaggggtggggccgctcctggaaggacagcatgacccgcctggccttagtgggctctgagcaaagccccagctttaggatttcatcttagaagcttgttaaagcatcactcattctctcccattttcaaggagtctctaattctttaccctcagaaacgatgtgctgtgattttatgagacaagcctttgggatctccctaataayggggggataaaggcctccccctcccgctcctctctccaggctggggtcttgtgcgaggtatggttaagaacacagatggtaggctgggcrcggtggatcatgcctgtaatcccagcactttgggaggccaaggtgggtggatcacctgaggtgaggagttcgagaccagcctggccaacatggggaaaacccatctctactaaaattacaaagttacccaggcatggtggtgcatgcctgtaatcccacctactcaggaggctgaggcaggagaatcgcttgaacccgggaggcggagattgcagtgagccaagatcgcaccatagcactccagcctgggccacaagaatgaaactccatcttaaaaacaaacaaacaaaaaaaccgcagacacccaagtcccctttgctgtgtttgctgtgtggctggagagggagcaagttacctgtgtggagtgtttaggacggtgtctgagtggcccagtgcccagctgcccacgagccgtggacatgggcgtggtggggaagcaggggcgccgtgaagaagagcacacctgggacgggcacccctggccactccttccctttgcgcccctgtatcctttgcttagacacgcagacacggtcaagagcgccctcctccccacttccccacctcccatcacggccttctcctgtgagaccccacgtgggttggaaatctccttccagatcctggcgcctgcccccttcctccacccctcttggccagggggcgtctcagagcccagcgtgcgcctcggtgctcctggccatgctggggggtgccacccacgggccacgctctgtgtagtgagatgcaggggctatgtgcagatatggggatgggcagccgggaagcccacacctcctcattccttgaggcagcccgtgccagggatggtttctcaggctgcctaaccccatcgtgcgtcctcacacatgtctcccagcccaggcctggcatggctgcaygcttgctctgggaagctccatgcgctctatgagaagtgcgtggagatggcttctgatggcctcatcacagaaactcaacaggccgygcattcctggtgtagcccctctcagtcctgtttgaccagctctgaagctgtcttgtgacttttcccatcgtgggtcacgtgcaccatcagtggattccggcatgaccacggattccggcatggccatgggaagcacacgcctgggggacgtcacccctggattcactgtcgtcgttgctgtcatcagagccctcccacacattggtcggccttgcctgtcagctctgtaaggttgaattagcaataaaaccatatgcttttggttgcagtcactttctgcataagtctttaaaaaggtcaaaaaggaagaaaacgcaacttctttaaaatacagattgtcctactttgaaaaatcccgtggacaaggacaatgaccacccacggtgacttgtgaaacgctcacattttcttatcgtcagcagccccagcrtcctccttctcccgtgtgggacttcctgtcctgtggaccacacggagttagagctgggggcagtgagagccgtcttcttccttcttggtagagagacgcgtctcgactccaaatctttaagcctctgtttctctctccatctctcacctcccaggatgtctttggtcaccaggagacccacccattacgctrccatttccataacatggatttttccccctcttccttcaagtgatgagttttttcaagtgataattttattcatgtggggtatttatattttgccgtatgtgccgagaagcttacgagaaaggtgtattttaaataaatcaaattatcaatcaatcaatcaatcaattagtgaatgcagcctggcccagaatattcatttttaatgaattttggtttcacacaatcctgggtcatccctggagggtaacatcatgcggtgtttattgtcgcaggtggggagggcaccctgacggtctcgctgctgccaaccaggccctgatttgtgtctcagtgactgaaagttagtagggtaagagcagctttccagtgtgcctgcgagccagactgatgtccagctccatgcctgtgagtcagcagccccatgcctgtgagtcagcatagggataaccatggcaccggggwtggcggatagcatggtggccacgcacaagcgacctactgtgtgccggccctgagccggctgcttccacatccccactcacctgttcacacagccacgtcatgagacgctgtgcctgactcctggggaaactgccagaggggcctagaaggcagctcccatccatgcgaatttggatgtgcagagttgcctttgtatcaacccaaacaaacccagtctggaaaactccctccacctagtaatggatcagggtgcaggtcccactctcggcaaggagacctgactctacgtcaagaggtcggctcggatgaaaggcccctggtttgactcaggccagggcggcccatgcgctctatgagaagtgcgtggagatggcttctgatggcctcatcactgaaactcaacaggccgcgcattcctggtgcagcccctctcagtcccgtttgaccagctctgaagctgtcttgtgacttttcccatcgtgggtcacgtgcaccatcagtggattccggcatgaccacggattctggcatgaccacggattctggcatggccatgggttccggcatgaccgtggattccagcatgaccacggattccggcatggccatgggttccggcatgaccgtggattccagcatgaccacggattccggcatggccatggattccggcatggccacggattctggcatgaccacggattccggcatgaccatggatgtcagcctctgtgctgaccacgctgcagatgcagggctggacgcctcatctcatttcatgcccaccgccgcctcacgaggccatcctcaagacgacgtcacttgtccacatgacacagccagggagcaggggcttcgaactgctggcctcgctcaggcctgtcgcttctcccacggcccccaccccggggcactggggctctgtcacactgggagacactgagctcagagaaaaagtttaatattttatataacacacgccccccatacactcacatgtgcacaactcacactcatacacactctcacacacaactcacactcacacaactcacacacacccacacatactctgacgctaaccacacaactcacacacacacacactttcactctaacacaactcacaaccacacacactcacaacttacacagcttacagaactcacacaactgacacacaaaacaatcacaagtcagctcacacaaaacacatacatagcttgtacacacaactcagacaaaactcacgctcacacactcattttcacacaaaacacacacaaaaaacatgctcattcacacacaccctcacacacagctcacacaaaaactcataaacactcatagcttatgcacagctcacacacaaaacacgctcattcacactcacgcaaaacacacagctcactgtctacagacactctgtgtatctgttcctttttcatgaatacctgaaaggtgtgtttttgaggcttgttcagcctttttcttcaggacactgccttgacctttcaccttttaatttgcgtttccaacttctgtgctactaccccctctgaagcattaatgggaaggtcagtttcctgcacttctgagtgaagaagcaggagctagctggaaggacttcagagcctggcctttcccttctggctgagcaggaaccaccatggaagtcctgggggaaggaggcagcttgttctcttcccagggactgggtgctgcattggtggtcagtggggaaaatgggccacattgtgaggaaggagggaggacaggaagtgatgtcagtgactcggggtgggagggatcagcactaagtagagactgttgcttaggaggtattagatacgaagtagggactgtgacttaggaagtacttagtatttagcagtacttagaactaagcaaagactgctacttaggaggtagtttgtaattatcattaatagtactttgtactaaacagactgctatttaggaggtacttagtgcttagcagtagttagtactaagtagacactgatacttaggagatatatagtagtgactagtgcttagtactyagcagagactatgactcaggaggtacytagtactaagcagagactacaacttaggaggtacttagtacttagcactaagtagagactactgccaaggagcagagcctgctctctgtgtggatggatctggtttgtaggatgttgcttcttccaaatcaacctttgtgggcttcctgcagctcctggccaactctgaaggtggtatctgtggtggagtttggctgggacagcgttctggggtccacagaaccatctggaaaacacgagtaaccatctctccactgagcatttcttctcatgaaaccagacagatctttttttcctctcactacagtgaccagacttttaaaccacaatgtccaggctgttgtgctcacatgggaatcatttttactagggttgggcaagagaaacaaggtgagaagtgccagtgtgaagcagtgaaatggtctgctcctcttgcattgattaattttgggagagaagactttctttgcctcttttcagctctgagtctggtatatggaaatgaaagctttcctgctttcctgctgtgtctgctctgatcacaggttgaggctgaagtgaaggcgtctgtgctttctagctggaatcttctcactccagcttcctgggttagcttattttgttttctaatcaacctaacattacacccyaaggcactaggaaatgaagaacaaactaagcccaaagttagtggaaggaaggaaataacaatgattagagaagaaacaagtcaaatagcctagaaaaacaataggaaagatcatcaaaattgggagttgttttgttgaaaagacacaaaatggacagatcttcagctagactgagaaatgagagaagactcaaataaatagaatcagaaatgaaagaagaggcgttacaatggataccacagaaacaccaagggtcatgagaccactgtggacatttatacgccaagacattggacaatctggaagaaatggagcccttcctagacacatacaacctaccaagactgaatcatgaagaaacagaaaaacagactgtaaygagtaaggagattgaatcagtaataaaatgtctcagccaaaataatgcccacgaacggatgttttcattgctgaatcctaccagacacttccagaagaactaatacccatcttctcaaactcttccaaaacactgaagaggaggaaacacttccaaacagattttacgaggccatcattaccctgatgccaaagccagacaaacactccagggaaagaagactacaggccagtattcccgacgaacacagatgttttctgaaaggagttgaactttgtgaattccctccctcactcttggccactgattgcaatctttagaggagattctcatcttttgaatctctccactttgcagacacgcttttgatttagaattctctctaattgaaaagaagcggaactaagaggttggagaagtccatgcctaggcaggtggaaagtggagcttgagatagaagactggagatggaaatgaaaataaacgatgggagaggaaggtgcagaggacggggcggggaggaggttgtactggaaactttaggttcagctcctttccctccagggatgaatggttacaggctgggctcttgggctgctaggagccactagcatggctctaccgggtgggtgaacctgccttataggccaagtcagagtcagttaagatttggacaataacagaagcaagcaaacaaggctccacagcaaaagcaaagctagtttagtgaagataaggacccctcggtttgcgactgtgctgtctagaaatatgggcctgagggggtttcagatggcagctttggtagagctgtggtctcccttctccaggaccatatgcactttgtgggaacattcgagccatctgtatcatttccttgacttaaaaaaggtcccaagatgttttcttactcagtgatcatttggggaggacctcagagctgtgattaggagaacggggagctgtagaacgttagctgtaaaatcaatcataagattcaggtaggatatgagaaaacagaacagaacactgcctcctttcctggtatgcccaaaacagggcgtgaacacttcagaaaacaatgtcttcagagctgaatttgggtgtgatgattcgtactttaaagtctgtgtcaggggaagtgaaggatttttttaaaatttaaatttaaattttatttatttattaattctttttttgagatagagtcttactctgtcacccaggctggaatgcagtggtgtgatcttggctcaytgcaacctttgcctcctgggttcaagccattctcctgmctcaacctcctgggtagctgggattacaggcacctgccatcatgcccggctaattttgtattttttgtagagatagggttttgccatgttggccaggctggtcttgaactcctaacctcaggtgatcctcccccttggcctcccaaaatgctaggattacaggtgtaagccaccacgcccggccgaaagtgaaggattctaattaaagtccgtcagcaaatatgttatgaaaggaaactatagccgaactggagaaagggaagagtcacctggtaactgaaggaatttctaaaatgggttaaccaagaacactttgatgcttccaccatgaagctggaactggatgctggctggcccaagaccatgatccacgttcacagggggccctgggcctgagggcacctgcccacggggctgccttggggcatctttattcagaagtgggctcctgacatggttcctgggcaccacagcagaggcctctgcctggaaagccaggctcagcttctgcttccacttcctgtccacaaacagtttgatggccttagactgagaattgtatctcaattattcaatgatgtttttcttctttgctgttagcaaaatatgcctccccattgaatcaatattaagatctagcaagggtaaagttcgaaggaagccttttgccattagaaagaccaaacacctgcccaggcacagtggccacacctgtaatcccagcactttgggagtcccaggcaggtgaatcacctgaggtcaggagttcaagaccaacctggccaacatggtgaaaccctgtctctactaaaaatacaaaaattagccgggtgtggtggcacacacctataatcccatctacttgggaggccgaggcaggagaatcacttgaccccaggaggcagtggttgcactgagctgagatcacgctactgcactccagcctgggsgacagagtgagagtccatctcgaaagaaaacaaaaacaaaacaaaagcccacacacctggtctttctgctgtggcaggctgtcctggtcgtattcgaggtctggactaatattgggtagtattcttttccttccctatcttcctctgcatttttatttaaaagactaatgtgctagttttatgttcttttggctttctctctctctctctttttttggtatattccccattgttttactgagacctgttaataggagagagaaattaaattatactaagccaacttcctccacacttatcaaaaagataaaaatggccatcctaagaaacaaagacactgcttgttccatcaaataatgcacataagccccaagtgcccgtctgacctgcctggaggttccagtggtatttttctccctctctctcctttaactagtaggagaggcgctggaggccacctcccctcctttcctttatgcttgggattatagctcacttcgccagttcccactcttagtctgtgtrttgcccgcaccacaccctcaacgtgtcatctacgttcccttcatccacctgctcagatccgtgattgtttatagcatcctccagtgccccggccaggattagcaaggatttcgtgacccaatggscgtggaggaagcgtggctttctttcatttcaccaggaaatgactgacgtcttgtcttggcgtgcatccagatgtgggaagtgcagcgttgcttgataacagaatcttattttgtgcagcttcccaggcactgaagcggggctgctgggagaagggcgtgaagtggtgtgacatcatttgatgtgtccttgagctccgagaggagaagcttttgatggtggcgagtgcagtggcaggggccgcagggatgcagacaaagccacgtccccattggtcctgctgctgtgagaatggggaggaaagtgactgcacaccctctggaaccttctgayggccaggggactttgaatagtttgccccacacggcaggagggtgggggccgcgctacggagcgttggcttgtggactgaaacaaagcgccccaggaaagaacaagctccgggataccagctccgggctccttgctggctgcaacttgaacgtrgtctgagagtcttggttagagctggaggtcgcgtctgctccaacagagagaactgctgactcttccctgcacagagagacagtgccccaaggggaatagctgacgggttttaccctcctgaggtttctgcaccatcctgctgtttggaaaaggcgcagaggaacatcgaccctctggctggcctcagagaaggccctcggtcctcagggcatggtggyggcccccaccccggggtgatgggggctgtggcaccttgaccgagcaaacaccaggctcgggtggcagctgcctgcctggctttccgctcccctccacggccctcacgagagcctctgaggccrgcaccctcttctccattcaggagtctggggagccgcgtggcttagcataggccagcctgtcctgggggcgtcctgggggctgcgtggccttcacacctctgctctcacctctgcccttgtagccaccrtgtcagggtccctggttttgtctcccttcatggggccttgttgctccagacttgcaggggagtcctccttgctgtacctaccaggacctggtctgcccctcaggactgaatccgtcggtccctggaatcctgctgagctgtcatgacctagagccagtcccaggtcccaggagcctctgtccgtgtggagctgcgacccgtgcttcctgggcacycacttcttaataacatgacctgggaagttcccgtttaagacaaggaaagtaaagcatcctggagcaatggttaacaagacctgaatctaaaataaaataagttccaacaaacatgatgttttgggtgatacagaaaccgtgaatgtggctggattaagagggacagtggctgagggcggaagaaaggtttctgatgagcggcagagaccagaagccttgctgtggcttcctyccttcctgtgccccgcgtctcgcctgctgtgcttttggtgccacccacaccccccgctttattttatagtaactggcaggacctgcttggcccagggcaggagggaggggaggacggtttcctgatctgcgatggccatcaggtgtgctgggctcctctccaggcccagctgtagggagggatgccccccagagctgagcttttcccctgtggaccctctggcctttcctcccagccaagcccagggcgtccttttccaatcagagccggacacgggcgtgacttagcgacttagccgccccgagaggcaggacggggcggacgttcccagcaggaggccgcggctgcactgtggagattgtgtgtgtgccccagccctgccggaacagctggcctccagggacgtcgggagcagccagcacaggtgtggccacagaaatcacagacacttgtgtcctgtgtgtatctccatggcagccgccgggctgcgggcaactcctgcaggctctgtgctgagctcagcgtgagggaagggtgtccttcgtgcactcccatgtaagcgctgtgtctgccggggggtgttcagaaagagggggagcaggaaacgagaagccagcatcagtgcaatggcagcatgggtggcggtgaagtggcagagtggtcgggcagggacaggttctacctggtaacagagtggctgggtggggacgggttccaccaggtaactgggtgaccaggcggggacaggttgcaccgggtaactgggtaactggggggccaggcagggacaggttgcactggccctgtggggagtcccactgagtgccatcacgtcttcacggcggctccatgaagacatacttgaggcatctcgaggctcacagctggtgcatgtcagactgggatcagactgtgtgcccccaccccacagacgccagggcagaccccaccttcgggcagctttgcttgaggttctgagggcccagggcccaggcagccttacccacccctcaacgtttgtctggtgtggcttctgaatgagcacggtggctagaggggtggcctgcgtgaagtttttccttcatgccccaagggagcacaagcggccctacctagatctgaggaggagaagggagaggagaagctggggctcctctgaagacattgcctgcctgtgtggcaggcaccacgtagcaatgtcagcagcatcttcatttagccaagcgtttccacmccatcccctaacgtaccgtaaggggctctgtttgcgatgaccagagatgacggccagcaatggcaaggacgatggtgatggtgcctgggatctactcacagctcacccagccccttcaacaaygctgtgggctctgcactgtcgtccttgggggagttctgggattctccttcttcagtcaccctgcagtttcccccacgacgtctccgtgtcctagaatgctaagcagcccgtaatggtggttttgggaggtgtggtcacaccggctgcttcctgcttgttgtggaggtgccgagtgtagaaaaatgggctctctagaaagcttttctatattgatacagaatcgatgtacatattttcagggtacatgtgataatttaataccattgtataatttgtaaagatcaaatcagggtgattgggatcttcacctaaaatattcatcttttctttgtgccaggaacagtcaagctgttctcttttggctaatttgaaacatacatacattattgttaactctagtcaccctgttgatctatcaaacactaggttttatttcttctgtctatttgtagccattagtcaatgtctctccttccttcctcccagctccccttcccatcctctggtaaccaccaatctcaacggaggcaccctcatgagatccatttgttagctcccacatatgagtgagaacatgcagtatttgtctttctatgtttggcttatttcacttcacataatgacttccagtttcccatgttggtgcctatgacaggcttgcacccttttttatggcagaatactattccattgtgtatatattctgcattttctatatccattcatccattgatggacacttaggtcgactccatatttttgctattgtgactagtcctgcaataaacacaggcatgcagatatctctttgatatattgatttcctttcttttggatacaaacccggtagtggaatttctggatcatatgttagttctagtttcacttttttctgagcaacctccatactattctctatagtggctgcgctaatttacattcccacccacagtgtccgagggctcctctccacatccgtgccagccatttgttattttctgtcttttcaataagagccattttgggccaggcccggtggctcatgcctgtaatcccatcactttgggaggctgaggcaggcagatcatgaggtcaggagatcgagaccagcctggccaacatggtgaaaccccgtctctactaaaaatacaaaaaattagccgggtgtggtggcaggtgcctgtaatcccagctactcgggaggctgaggcaggagaatcgcttgaatccaggaggtggaggttgcagtgagcggagattgtgccattgcactccagcctgggagacagagcaagactccgtctcaaaagaaaaaaaaagccrttttaacgggagtgggatgatatctcaytgtgattttgatttgtatttctctgatgactatatctgttggccatttgtaagtttttatttgatgactatatctgtttaccacctatatgtttttatttgatgactatacctgttggccatttgtatgtttttatttgatgactatacctgttggccatttgtatgtttttatttgatgactatatctgttttaccatttgtatgtttttatttgatgactatatctgttggccatttgtatgtttttatttgatgactatatctgtttaccatttgtgtgtttttatttgatgactatatctgttggccatttgtgtgtttttatttgatgactatatctgtttgccatttgtatgtttttatttgatgactgtacctgttggccatttatatgtttttatttgaaaaatgtctattcagatcttttgcccatttttaaattagaggtttkttttttttttgctgttgagtgttttgagctctttatatattctggttattaatcccttgtcagatggatcgtttacatatattttctccattctgtgggttgtttcttcacttttttgtttcctttgctgtgcagaagccttttagcttgatgtgatctcattttatctttatttgctttggttatctgtgcttttgaggccttaccaaaaaaatctttgccctgatcaatgtcctggagtgtttccttagtgttttcttttagcggtttcatagtttcgggtcttatatttaagcctttaatccattttgattcgatttttgtatatggtgagacataggagtcttgtttcattcttctgtgtatggaaatccagttttctcagcaacatttattgaagagattgtcctttccccaatatctgctcttggtgcctttgtgaaaaatgagttggttataaacgtgtgaatttatacctggattctctattctgttccattggtctgtgtgtctgtttttatgccagtactatgcttatttggatactatagctttgaagcatatttcgaagtcaggtcatatgagacctccatgtttgttatttttgctcaggattgctttgggtatttggggtcttttgtgagcttatgtaaattttagagatttttctttctgtgaagagtgtcattggcattttgatagggactacactgatgtctacagccatgcccaccctgaacaagccccatctcatctaatagggactgcattgaatctgtcaattgctttgggtagtatcgacattttaacagtattagttatttggatacatgagcatggaatatctttccagttttttgtgtcgtcttcaattgttttcttcagtgttgtatcgttttccttgtatagatcttttacttctttggttaaattaatttctaggtatcttatattatgtttagctattggaaatagggttactttattgttttttagattgtttgctgttggcatatataaatgctgctgatttttgtatgttgattttgtatcctgcaactttactgaatttgtcagttctgacagtgttttgaagtctttggtgttttataaatatgataagatcatgatgtctgcaaataaggctaatttgactttttcctttccaatttgggtgcctgtatttctttctcttgcctaattgctgtggtcaggacttcagtgctatgttgtataaaaatggtgaaagtgaacatccttgtcttgctccaaatgttagagaaaaggctttcagtgtttccccattcattatggtrttagctgtggatttgtcatatatagcgtttattattttgaggtatgttctttctatacccattttgatgagtgttttatcataaagggatgttgaattttatcaaatgcttttttagcatctattgaaatgatcatgtagttttgttcttaattctgttaatgtgatgtattatgtttattgatatgcatattttgaatcgtcattgtatccctgggatgaatcccactcgatcatgttgaatgatctttttaatgtgttcttgaattcagtttgctaatattttgttgaagatttttgtgtctatgcctatagtcctcctttttttttgtcttgtcttttcagcttttggtttcagggtaacactgacctcatagaatgagtttggaggtattccctcctcttcaattttttgaagagtttgagtagaattggtattatttcttcaaatgtttggtagaattcatcagtgaaggcatcaggtcctgggcttttctttgatggtaaatttttttattatggctttgatctaattacttgttattggtttgttgaagttttctatttcttcatggttcaatcttggtagtgtccaggaatgtacctatttcttctaggttttcccatttcttagcatgcagttgtttataattgtctctaatgatcctttttattcctgtgatctgagttgttacatctcctttttcatttctgactttatttatttggatcttctttccttttttcttagtctagctaaaggtttgtcaattttgtttaccttttcaaaaaactttttgttttattgatttttctgtatattttatcttaatttcatttatttctgctctgatttgtattatttctttccttctactcattttaggtttggcttgttcttgctttccttggtccttgaggtgcatggttaggttgtttatttgaagtctttctatgtttttgatgtaggcatttattattatacacttgcctcttagtattgcttttattgtatcccatagattgtagtatatttcaattttcatttgtttcaagacatttttaaatttccttcttaacttcttcattgactcattggccatttagaaggaggtttaattcccatgtgtttatgtagtttctggggttcttcttgttattgatttctagttttagtctatggtggtcagaaaagatacttgatatgatttctgctgctttgaatttgttgagacttgttttgtggcctaagatgtggtgtattctggagagtgcttcatgctctgatgaaaagaatgggtattctgtagcagtcgggtgaaatgatataaatgtcagtcaagcctatttggtgtagtgtatagtttaactctaaagtttctttgttgatttcttgcctgaatgatctgtccattactgagaatggggtgttgaagtgccctgccattattgtattgcgggctatctcttcctttggatctattaatgtctgttttatatacttcagtgttccattgttgggtgcatatatatttataattttatatcctcttgctgattgacccttttatcactatatagtgatgttctttgttgctttttgcagtctttgacttgcagtctattttatctgatataagcacagccgcttctgcccatttttggtttccacttgcatggaatatcttttttgttgtttctgagacagggtcacattctcttatctcagctgagtgcagtggtgtgatcatggctcactgcaggcttgaccttccatgctcaagtgatcctcccacctcagcatcccaagtagctgagaccacaggcacatgccaccatgcccrgctaatttttgatttttttatagagatggagtctcactgtattgcccaggctggccttgaactcccagacacaagcaattctctcaacttggcctgtcaaagtgctgagattacaggtgtgagcctctgtgcccagcctgaaatatatttttctattcctttcagtcaatgtccatctttatagatatggctggtttattgtgggcagcttatagttgggtcttawttctttatccatacagccattctatatcttttaattggagaattgagtacatttaaattcaatgttattattgatgagtaaggactgactactgctattttgtttgttttttcattgttttgtaactcctcattcttgttgccttgcttgctttctgtcttactttgtggtaaagtgattttctctgctagtatgttttaattcattgctttttatttttagtgcatgtgttacagtttttttttattgtagttgccatgagacttataaaaaacaacttaaacatataacaagttatcttaaagagataactgagatcacaaaagaatagaaacaaagaaaaaaatgaaaaaaaacccctctgtattttaagtccatccccccacactttgacttcctattgtctcaatctacatatttgtatgctgcctatctcttaataggttgctgcagctattattgtttttgacagatttgtcttttgggcttcattctacggttatgagtggattgcaccccacaattacagtattggagtattctgggttagtttgagtgcttacttttaccggtgtgttttataccttcaaatattttctttttgcatgttacttttttttctttcagactgaagaactctctttagcatgatttgtaacacaggactagtagtggtgaattatctcagcttttgtttgtatgggtaagactttatctctcctttatagttgaaggaatgctttgctggatatagtattcttgggtgacaggtttttcatttttttctccttccagcactttgcaaatgtcatcctactctctcctggcctgtatggtttctgttgagtagttggttgccagacaaatgagagctgctttaaatattccttgcttcttttctcttgctgcttttaggatctctctttgtccttgacttttgagagtttgattattatatgccttacagtagtcttatttgggtcaaatctgtttggtgttctctgaccttcctgtacctagatgtttatgtctttctcaagttttgagaagttttctgttattgtttctttgagtaagctttctaccccttgttcttgctcagcttccccttgaacatcaatcattcttatatttgatgttttgaggtaattttctgtcttgcaagtggtcttcatccctcttcattctttgttctttttccatccctgattgtgtattttcaaatagcctgtctttgagctcactgattccttcctctgcttgatccattctgcttttgagaggctataatgaatttttcagttcagcaaatgtatttctcagttccaagatttctgtttgaatttttaaaaattgtttcaatctctttgttaaatttctgaattgcttttctgtgttatcttggaaatcactgagtttccttaaaactgctattttgaattcttggtccgagaactcacatattgccatcttattagggccaatygctagttccttactttgtccatttgagaaggccatggtttcccatttgctgctgtttcttgttgatgtgtgtctgtgtccttgcactgaaggattatttatttactccagtcttgtctcctggcttgttttagtttttattggatacatttgcttagagagtcacataatttacctgtggaatttctttttctcccccttctaggtccctgtctccttttcggcactagatggcaccttaagcccaggtttaccttggctctggttaaagatctgagtgctgcctgtactgaaggttaaagatctgagtgctgcctgtactgaatgggagaggtctcaaaggggatatgccagcagtgtgagaaggctggctggggcctcgtgctgaggggacctgtggagcattcctgctacagggtggtgctgtgagcagccactctgatggagtgcctctttgaccgagttgcagagtagagtttgtggggctggggactatagtcccacctcccccttttatctctggctgtcctcagggatgtttcccttcacacatttgcagcgcttcccatgggttgaagcaggaasaggtctccagccagggcccccaagaggttggagaagctgattgtccacctcaccctcactttttccagcatagaagctatgagttgaggggaaatttcccatactcttgatgccaaacagattatgaggagggatggtgcagacatggtggtctgatgcttttgctgtctgcttggggtgttttcaattttctgtgttcctgggaactgtctccttttgtatttgagtgtgtggccattgctgggattgtgtcagtgctgtgtgtgtttttgcttctctgtggagcagagtgaagtcaccttgcttctactgcaccaccattttgggaccagaagtccctcctagtagaaatttccaacaggtgtagtggaatatgaaatgtatctggagaaaatattttcttttcaaaaatttcaccttggaaagcttctgatgttgctcagaaaagtttaaaattcttctttgggatcttccttcagtaacctggtagagggcgatctctgaacattctcagtaatggtgactcttctttttgaaggcagatgcatgaggatgtggcataaagttagttgataccaggtgggataaataagttatttgcatcccagtcattgactaagttgattgtcacactgttttcaatgtaaaagtgaagtgtgaacatataacaacaagactgatttattgtctggtttctaaactgtctttgtaaatgtgttccaaagagacataaaatatcaccaacaatgctaccacctttgaatacgcatagagctttttaatgtcttgaatgtataggttccatttctatttgatatacatgtaaagccttaactactttatagaaatgctttgcatttttccagggattgtgaaaatgtgagttaaaaccatgtcaaggagtctgtgctggccctgaccaggcctgggacaggcacccccactgtgcacagttgagcagcccaggaatggaactatgaccctgtcttctctgattgggaaggagagcccacctgatccctttaattgacttcacgtcatcttcttaaggagtgtttcctctcagttcacaaagcctacaggcttcctgcatgggatcatccttcacactctgctcaccagccctttccttgctgatgcgagggcaagctgcacattcatcttccgtaaagagcattttgagcatgagtttactgctgattagagtgccactgtatttttttatatagtcgtgaattctactcrtaaaatctagatcctgcaatgtgctgaccaccgcctttccccgacacttcttcctcgccacctggggtcttcccgtcacacgtcaggggctcctcctcakccccatttcaaccctgaccacgttcayattttgaaatcagcctctcatttacagctttcctgtaggcaaaataaaatgctaatagatttcatttctgattcttatcactctgatttatctctcagtattaccgcgtttgaaatgaataccgcctctctctcacccttgaagctctctcttctcctggctcctgagcacatgaccttgggctgtctgtctttattgtygattttgctcctctgctcagcacctcttttttattgtttttctcctaaaacagatggaggatctatcccatcctctttactttgacagattttctactgttccattttctcacaccttctcccaactgacctccctcctcccatttatccacgcacagtgcactctctgatgagtagctctgaggcctccattcgtcctgtgacccagggtcctctcctggagctggtgccactggagcctagcttggcagtcagtcatcttcagcttcacccccaaacctttgcatctctgttcctcagcctggctccctcctccctccaaacagcctgtcgcctggatccagtgtgtttgaaactgcaagccacagcccattaatgaccctgagagagttttagggtgttgcagccagaaattttaaaaagtgagacagaagagaataaatatgatataataggacacagtgatacgtgagaggctcccacgcgattagggtaagtgctgtgttgtgrgacttccccaggtctcacttcaagatgcatatcttactcttggataccaccggaaaaaaaaaaaaaaaaaagggaagcgctgtcttcgttcctcatatgcagcgtgcaccttggtttctgtccttgctatgcccttgcctgcttaagtgttgacgtgttgcatgcaagccgggaccaccatgcacgctgccaccacttgctctgccgcctccgtttccctctcagcagtctgtccctggcattctccacctgcccctcccacggggatctcctctgccacacagttcagcctgcagaagaaacaaacgtcgtccccacccacaaacctggtgtgttcccagccttccttctttgtgatttcctcttccccagtgacctagccaacctctcttgcagttaaccttgacaccttgttctcctttaatcctgcatatactgattatttttaccaattctgcttctcaaactatccacactagtgttctctgagtttacaaccttatcatctctctaatgaaccgtttttgtaactcttattgaatgccttcccttctccctattatctttaattcattattcacaaatcctgaggattaaaataggaaggacttagaatagtgctggctcatagttaaggctcagcaaatagaaactgctatgtatctttaaatttttaattttaatattgttacttttatcctccttctgggacacagttggatgatatttctgtccgatgcagagcttttactgctccccactgtgcacagatgcaccggtgcttcctgatgtagctttgacgtcctcctgtgactatgcaactcccctccctctgttcctgcactgcmcccacctccctccccatgtcatacaccatcccctgagtgcaccactcagtgccacagccccaagtcccttcccatgctactccgttatcttagagttcctcccctaatccatccccacctgttagaattctatttatctttccagtcttagttcaaataccacttgtttctatgaaactttcttaactttccaacacaaattcacctcttcatttctctattcccttagcagtttgctcataactttattatataatgattgcactccaacttggatcttagctaattacgtacctgcattccacactagactgcaaacttgaggaagatgggtgctgtggctgccctcaaaccgtatgtgcctcccataggacacaagagttggttatgcaggtgttgtctagatgaaattatatagcatctatccttcttgaattggctttttgcctcagcacagttccggggagattcagcgaggctgtggtgtgtactaatcgttctttccttcataaccaagtggtgctccgtggtgcagaggtgctgcatggtaaccatccacctgctgagggactcggtggttcccagtttggggctattctaaataaaactggtgaacattcatacacaagattttgtttgaacataagtcttcatttctttgggatgaatggtcaggggttcaatttttgtgtcttatgataagtatatgtttagtttttaaaggaactctcaaaccattttccagaacaaaatttgacattcacagtaaaaaagaaaaaaaaaagtaacagtgatacagtttttctgaatccaaatcctttccagcatttgatgttgtccctattttttattttagcctttctgataggtgtgtggtggcatctcattgtgggtgtaattgacatttccctgatgagatgatggtcagcatctcttcgtgtggttatttgccatcagtagatcctctttgtcgaaatgtcttttcatctctcaccctttttctaattgaatgtttttaatgtttagttttgagagttctgtgtatattcctgatactagtcctttgtcagatacgtggtttgccaatatttctccaactctgcgctcattstttcagctcttaagagggcctttccacagagcaaaagtttttaattttgatgaaggccaatttgtcaatttttctttttatggaagatgtttgatgtcaagtctaagaactttttgcctagctctagcttccaaagattttctgttgtttttttctaaaagttttatagttttgcatttttacatttatgtccatgagttgcttttgtgtagactgtgaagcttacatagaggttcctgtttttgcctgtggatgtccaatcactccaggaccatttgttgaaaaggcaaattttcctaccattaaattgtttatgcatctttgtcaaaaataacttggacatatttttatggatctatttctgggttttctattctattgtattatttgtatctgttcatcagtactacacagtcttgattattgtacctatataagacttgaaattatatatgatcactccttccactttatttttattttcccaaattgttttagctactctagttcctttgctcttccatataacttgcttttctgtatctacaaagtatttccctgggattttttataggaattatgtgaaacctctgtatcaatctggggagagttgacatcattattatgttgaatcttctgatctaccaacatggtatgtctgtcatttattttgatctttggtttctttcatcaccattgtktgtgtttcagcacataggtcctgtacgtggtttgttaaatttacacctaggtattctttgagtggttttaaatagtattttaatttcagttttcatgccttcattgttagtatatagtacaagaacttattaggtttgagaggtttttatattttttgtagagtccttggggctttctgtgtagataatcaggaaataggacataggtacagtttaayttcttcctttgtgtctgcatatcttttattttttttttatcttgccctattgcactggctggaacttccagctttatgttgaataagattggtgagagcaaacatccttgctttgttcctagtcttcagtgaaagcttttgatggttactcaccattaagtacagtgaaatgtggggttttgtagatgtttattgttagcttgataaagtgccccttgatttctatttttctgaaagttttcttcatgaatgagtgttgaattttttaaatgtcttttctgcatcgattgctgtaatcatgtgatttttttcttctttagcctattaatatggtggattacattgatttgttttgaaatagtgaaccagcctttcattcctggaataaacctcatgatgtatcattattttcatatattgctggattttatttgctaatattttgtaaaggatttttgtgtctacatttgtgagggattttggtctgtaggtttctttttactgtctttgtttgcttttggtatcgggttaatattagctacataaaataaattgggaactgtttcctcgccttctattttctggaagatatttatggaatttgttttaattcctctttaaatgtttggtataattctttggtgaaaccatctgggcctgattatttctttctgggtagatatttaattattaattcaagttccttaatagtgtagaagtattcaaattattgatttcacattggatgaattgaggtaacttgtggatttcaaggagtcgatccatttcatctatgttgtcaggtttatgtgtgtagagttgtttattccctgattatccttttgatgtttgcagagtctgtagtgacttcccctgtttctttgcttatattgataatttgtgtcttctctcttgttttttgttagtcttgatagagatttgtcaattttactgatttttttcaaggaaccagctttcattgtcatttatcttctctayttttttctcacttaaattacattgatttcttttcttatccttattatttattttcttctactttayttgggtttattgtgttctcctttattacagattcttraagaattcagattattgatttgagactttctcttttatttttcttttgacttttgttttcggtttgagggtacatatgcatgggtgaattgtgtgttgttacagtttggtgtgataacaatcctgccacccaggtagtgaacctagtcccttatagcttttcaacccacgtcttcctcccaccctctgcctttcatagtcctcggcgtctgtcatcctcatttttgtgtctgtgtgtactccgtgtttagtttccacttataagtgagaacacgcagtatttggttttctgttcctatattaatttgattaggatgatggcctacagctgcatctatgttgctgcaaaggacatgatttcattatttttatggctgtgtagtattccatggtgtatgtgtaccgtattttctttttccagtccatcatcagtgggtatctaggttgattccatgtctttgctattgtgaataataccgtgatgaatgtacaggtgcttgtgtctttttggtaggatgatttattttcctttggctatatgcccatactgggattgctgggtcgaatggtagttctgtgttaagttctctgagaaatttccaaactgctttctacaccagctgaactactttacattcccaccagcagtgtataagcattccctgttctctgcaaccttgtcaacatctgttattttttgactttttaaaaatattcattctggctcatgtgaaatagtatctcattttggttttggtttgcatttctctgatgattactaatgatgaacatttttcctacgtttcttggccgcttctatgtcttcttttaagaagtgtctgttcatgtctcctacccattttttaatggggctgcttttttcttgttgaataatttaagttccttacagattctggatattaaatttcttttggatgctgatatggtttggctgtgtccccacccacatctcatcttgaattgtagcttccataatttccacgtcttgtgggaggggacctggtaggagataattgactcatggggcagtttcccccatattattctcatgttagtgaataagtctcatgagatctgatggatccgaaggaaaccctttccgcttggcattcattctctcttttgcctgctgccatgtaagacgtgcttttcaccttccatcatgattgtgaggcctccccagccacatggaactgtgggtccattaaacctcttgctcttttagtttacccagtctcaagtgtgtctttatcagcagtgtgaaaatggactaatgcagatgcatagtttgcaaatattttttcctaccctataggttgtctatttacctgttaatagttgcttttgttgttcagaagcgctttggtttaattaggtccctcttgtctttttttttttcttgcagttgcttttggagatgtcatcattaaatctttgctaaggcctgtgtccagagtggtgtgtcctacattttcttctagggtttttatggttttaggtcttacatttaaatctttaagccatcttaaattgatttttgtatatggtaaaaggaaggagtcaagtttcaatcttctgcatacggctaaccagctatcctagcaccatttattgaatagggagtcctttctccatttcttgtttttgttgactttgttgaagatcagatgtttgtaggtgtgtggctttatttctggtttctctaacctgttccattggtctatgtgtctgtttttgtaccagtaccatgctgttttggttactatggccttatagtatattttgaagtcaggtagtgtgattcctccagctttgttctttttgcttagggttgctttggctattcagcctttttttttttttggatccatatgaattttataattcttttttttttctaattctgtgaaaaatgatgctggtggtttgataggaatagcattgagtctgtaaattgctttgggtaatgtcaccattttaacaatattgattcttcctatccatgagcgtggaatgttgttccatttgtttgtattatctctgcagtgttttttaattcttgtagagatctttcactttcttggttagctataaccttaggtattttattctttttgtacatgttgtaaatgggattgcattcttgatttggatttcagcttggaaattattgatgtgtagaaatgatattagttttttagtttttgttttggtttgctaagggtaagtgaattgtatgctactggtttttatacattgatatttttttcctgaaactttactgaagtcatttattagttctagaagtcttttggcagagtttttaggggtttctatgtatagtatatcatctatgaagagagataatttgacttcctcttttcctatttggataccttttatttctttcccttgcctgactgctctggctaggaattccaatactatgttgaataggagtgatgagagtgggcattttgtttcattccagttctcacaggaaatgcttccaacttttgcctgttcaatatgatgttgcctttgggtttgtaattgatggatcttattattttgaggcatattccttttatctttgtcctttgatgcctaatttgttgaaggtttttaacatgaagggatgttgaattttattgaaagcccttcctgtatctattaagatgatcatatggtttctgttttcaattctgtttagtgtcatagaatgatttagggaggagttcctactttttggttttttgaagtaattttagtaggattgttactagctctgctttctatgtctggtagaattcagctgtgaatttgtctggttccgggcttttttggttggtaggttttttttttattagcaattcaattttgaaagtcattattcatctgttcaggatttgaatttcttcctggttcaatattgcaaggttgtatgtttctgggaatttatttatttcttcaaggtgttctagaagaaatggaaaaaacccagaaaacctaaaaggttttcttgtaatatcaccgttgtcatttcttattgtgcttatttaggtcttctatttttgttaatctagctagtggtctaccaatcttatttattatttcaaaaaatgaactttcttttgtttgtgtttttgtgtcccaatttcattcagttctgctctgattttgattttttcttttcttctgctagctttgggattggtttgttctttttttttctagttcttccaggtgtaatgttatgttgttaatttgagatctttctaactttatgatgtagttgtttagtgttataaactttccttttaacactgctttagttgtgtcccaaatattctggtatgttgtgtcacagttttcattagtttcaaataattttttgatttctgcattaatttcattctttacccaaaagtcatctaggagcaaaatgtttaattttgatgtaactggatagttttgagagatcttcttgttttttatttgtatttatattacatgtgggccaagagagtggttggtatgatttcaattttctttggatttttttgagacttgctttatggcatgtggctgatcttagagtatgtgtcatgtgcagataagaagaatatatattctgttgttgttgggtagtctgtagacatctagaagacccagttgatcaagggttgagtttgagtccagaatatctttgttttctgcctctatgatctgtctaatgctgtcaaatgggatattgaaatctccccctattattgtgtttatgtctctttataggtctctaagaacttgttttatgaatctgggtgccccaatgttgggtgcataaatatttagggtagttaagtcttcttgttgaattgaaccctttttcattatgtaaagcccctctttgttctttttgatcattgctggtttaaaatctgcttcatctgatataagaatagcaacctctgctctttgttgttttccacttacaagatagatctttctccatccctttactttgagccaaagtgtgtcattacatgtgagatgggttcttgaagacagcagacagttgggtcttgcctctttatccaacttgtcaatctatgccttttaagtgggtgtttagcctgtttacattcaaggttaatattgatatgtaaggatttaatcctgtcatttgtgttgttagctggttttcatgtaaacttgattgtatagttgctttatagtgcaagtgagctacgtatttgtgtttttgtggaggcaggtatctttcttgtttccatgtttagcactcccttaaggacctttgtaaagcgggtctaatgatagtgaatttctttagtgttcacttgtctaaaaatgattttatttcttctttgcttatgatgcttagttttgtgggatatgaaatccttgattggaattttttttctttaaggatgctgaaaatagggcccccagtctcttctggcttgtaagcttttttctgacatgtctgctatcagcctggtgggttctctttgtaactgacctgccctttctctatagctgcttttaagagtttttctttcacaacaaccttggagaatctgatgaccatatgccttggggatggtcatcttatatagtatctcacaggggttttctgaattccttgaatatcatgtcaacctctagtgagattgggaaaattttcatggactgtatcctcaactatgttttccaagttgcttactctctctccttctctttcagaaatgccagtgagtcatagttttggtcactttacataatcccatacttttcagaggttttattcattttttaacactcttttttctttatttttgtctgcctgtgttgatttgaaagaactgcctttaagctctaaaattcttctctcagcttggtctcttctgatgttaatgcttccaattttattatgaaattcttatattgaattttaaatttcagaagttcagtttggttattcttaaaatggctatgttgtctttcaactctcaaatcatttccttggattgagtttcaactttctcctgtatctcattgagcttccttgccatctagactctgaatcctatgtctgtcatttcagtcatttcagtttgattaagaaccattgctgggtagctagtgtgttcatttgtaggtaaaaagacactctggcttttagaactgccagagttcttgtgctgttttctcatctgtgagtgctgatgttcttttatccttttgaagttgctgtcctggggatagggctttttgtttttatgttcgttatttctcataagagttttgctgttgtgtaagttggatatagttgattggctttgtttctgaattttttcatagggccgaggttcagcttggaactcctgggctgtatgctctaaccctggtgacctgggaccaggcctgtggctttgtcctctggccccttgagctttagtaccagcttcactgggaggtcaaggtgcagctaggctgctggtgaaagcactctatcaggggccaccagctaaactgccccattggtggttgctggcaaaagtgccctggcagggtgggtgggggccactggcaaaagtgctccagtagggccctcttttttaatgtaagcatttagtgctaaaaatttcacttagcacagttttaactgtatgtgccatgaattttgatatgttgtgcttttattttaattacatgtaatgtattatcttctctttgacccatggattattttataacatgttgttatatttccccattatctttctgttattgatttctaccttgactatattgtggtcagagaacacactctgaatgattataattttgctgaagtttgttttatggcccagcattaagtctatcatggtttgtgttctatgagcaattgaaaagaacatatactctgctcttgttgggtacagtgttccataaatgttcattagatcctgttgattaatggtattgttgagttcttttctatctttgttgattttttgtttagttgctctatctatataattcatatataggattgctgtatcttcttagtgggttgacctatttataactctgtaattcccttctctgtagccattttctttactctaaatgttaacttatctgatattaatatagctattgcttccatcctttgattaatacttacatgatatatttttaaaaatatttttactttcaaccatcctatatcattttattcaaagtgagcttcatatagtgtatagttgagtctttttttaaaaaaaacccactcagccagtgttttcattgtcatatttagcccatttacatttaatgtaattattaacatgttaggatttaaaactcatttaattttgtattttctacttgttcttgtattttttgtttctttgtttcttcctcccttcctttgagttactttaatgattttggaaatccactttatctatgtttttgagtgtatgtctttgatagctttcttttatttattgttctagatataatattcatatacatattcataacattaaagtttactggtgtcataattttaccagtttgggtgaaatatagaaactttaccttcctttatgacattttacttatgcccctcatttatattataattgtttaaatatttcctctatgtgcatttaaaatgacataagacagtagtatggtgtttaattgaactgtcaagcataaaactcaaggaatgcttattgtacttactcaggttgttgcttgccatgttcttgcattcttcctgatgctccaaaattcctttttttatatttctcttctatatggagacataaatttagtaattctttcagagttggtctggtgaaaaacacaattttcctttttctggggatatctttatttccccctgattcctgaaggataacttcactgggtatctggattgatagacttgtgggattctgggttgacatatttttctttcagcacttgaaaaatgtgctgtttccttgtggcctccattgtttctgataagaaatcccctgtcatttgaattgtgttttccttgtaggtaagttgtcatttttctctggctgctgttaagatttttctttgtaagttttcagaaacttaattattatgtgtcttggaggagatttgggtttaccctgtttggggtatgcttagcttcttaaagttttaggttcatgtttcttccaaaattgagaagttttcagccattatttttctgagtaccttttcagacctgtcatcttgtcttctttcactcctctttttgaaactctgatagcatgaatattatatctttggttatagccccgcagttgctgaagctttatcatgtttttctactattttctctgtgttgttgacattgagtaattcctactgttttatcctcacttcactgattctttcctctgtctctccatccttctgttatgtgcatccactgmgttgtttattttggttattgtatctttcagtaataatatttcaatttggcttttatttacatcatctattttctgagacatcctactttttcatttgtttcaagtgtgttcataattgctcattgaagcatttttatcgtaactggtttaaaatctttctcaggcaattttaacatctcggtcatctcagtgttggtttctgtggattgtctcttttctatttattttgtgatcttctttgttctttgtrtaaccagttattttcttttgaaatctggacatttttgtattatgtcatgattctggatctcatttaaaccttgcattttaactgtctctttttggacactcctcttctgggggtaaggggtggtggtggtgattccttgtaactgacagggagatggaagtctagattccccaggaggcctctgttgatacctgaaggtggggtctttttactgattggttagggagaggggtgggagtttcaacttcccagatggtctctgctggcactgcaggggttgtggtaattacaacccaatggagatgaaagttctggatccctacttggccttctctgacactacctggtaggcctgaggggaggccttattacagcctcatgaaagaggaagtctagatccccatttggcctttgttggcatgggtagggagaggctgtacttttttctgtggtgttttgctggggtagagctgttaatatctaatatttttctgtcttgctgagttgattctttcctgactccttgattagagagaggctgctttagttgtgtgtgtgtgtgtgtgtgtgtgtgtgtgtgtgtacacgctggtgtttcyggattgcggcctctttgactccaagtctgaggtacctgaggcaaaaagaaaacccagggaatccaccaccatgtccttctctgctctgccttcgtattgccatccttcagagtcttatgcttgttttacgtatgctcagagattttagttgtacttagtgggaagacgtatgtcatctctgggagtggattccttcttcccagggttatattttctccaagatatgccacggacagaagttcataggagatgcttaaactcccatacctctgcattgttttgtttgttttttatatctaagagcacagtttcttctgacttccgggaaggctgagatggctgggctaaggtatacagggtcctctcagactgcccagtacagatgattctgagtagttgaccaactgttgttctggaagaactgagcctttatcatagatcccaaagttgacataactcagacttatatgatttttagataaaaatttttaaattttagttatttaaattttataaatgatatttttcatgaaaagttctttttgtgccattgattttctgtttcctgataaatattaatattaagagaatcccttttaggaatggcgtggttaaaatatccttatttctaaatccacaataatagatattatactaacattgcaaatgtgctttcagttgagtatactcccaagaatggatcagaaatagctatataaacaaaagtacatttcatagtgggtgtttttaagttgctttggcaaatgggatagacttgattattattaagtacatttaatcttaaattggatagtagtgagtgtggggcctgttttctgcagcgacctatactctaagtgatatattccaactagagcagcttagagtaagttggaggccatcctaatggtgaattttcctatcattcttcacttcaggtaatgccatttaggcttttgagatttagaaatatgacaattgctttaatttgccgtctataacatttaaaaaatctagatttgcatgtgaaaaaaatatttgtgtgttcatgaagatagcttatatttactgagctcttttaattccatccagaatatgtggttctcatcatgttctggacttcctacgccacacacacacacacacacacacacacacacacacacacacacacaagcacagagccatcctgatttgaagattttggtaatgtgtttttgtacagggcataaaaatatatctctgtaattacatgatatttagtgattagataattatggataattgcatggggtagttctaagtgctaaagtgttaccataagatctaacatgtacaaattgcataataattattcttgagagttatttggtaattttgagcataattatcatgtgatccacagtgcatgtaattaatgcataatcacatggattttgccttcataactacttcacccttgttataaagctctttgtcataacatttgagtataaatataatgtaattggctcccggatacagtacattaagccccatgataattgctttcacagtaacaataccccttattccattccaattgctgtcttttaagattttgttaggaagaacaaaatacctaagatatggtggcgggcaggtagaggagtgggtgagtggcgggtactatgtgcttattgtggatgaggagtatctttgctgtgaccacaatatttccatgtagatggaagatgtttccatctttcatagtagataaaaatctgtcttctaactaaacttgtatttggtgtaaggctccttgctgtctagccatagtcagcacccattaagtctatttttttaatttttaatttttgtgggtacacaggtgtatatatttatggggtacatgggatattttgatacaggcatacaatgcataataatcacgtcagggtaaatgggatgttcatcacctgaagtatttatcctttcattgtgttacaaataatccagttatactcttagttatttgtaaatgtacaataaattattgttgactgtagttaccctgttgtgctatcaagtaccagatcttattcattctacttaactgtatttttgtactcattaaccattcccacttgccccccgccccctgccaatttccttcccagtaacaatggttacttccttctggtagctgttgttctactctctataagttcagttgttttaagttttagttcccacaaatcggtgagaacatgcaaagtttgtctttctatgtctggcttatttcacttaacataatgattttcagttccatccatgttgttgcaaatgaaagaatctcacctttttatggctgaatagtactccactgtgtagaggtaccacatttttaaaaatccattcatctgttgatggacatttaggttgcttccaaatgttcactgttgttaacagtgctgcaataaacatgggagtgtggatatcaatttgatacactgattaccttttgggtataaacctagcagtgggattgctggattatattatagctctattttcagctttttaaggaacctccaaactactctccataatagttgtactaatttacaattctaccaacagtgtgtatgagggttccctttttcctatatcctcgccagcatttgttattgcctgtcttttggacaaaagccatttgaactgggtgagatgatatctcattgtaggtttgatttgcatttctctgatgatcagtgatgttgagcaccttttcatacgcctgtttgccgtctgaatgtcttttttgagaaatgtctattcagagttatatctatttgcccatttaaagttagattattgaaatttttttctacagagttgtttgagctttttatacattctggttattaatcccttgtcagatgaatactttgcaaatattttctcctattctgtgggtatctcttcactttgttgattgtttcctttgctgtgcagaggttttttcacttgatgtgatcccatctgtccagttttgctttggttgcctgtgcttgtggagcattactcaagttgctttggctgcctgtgctyatggggtattactaaataaatctttacactatccagtgtactagggagttttcccagtgttttcttttagtcgtttcatagtttgaggtcttagatttatgtctttaatccatttttatgtgatttttgtataggaagagataggagtctagtttcattcttctgcatgtggttatccagtcttcccagcaccatttatagaagagactgtcctatccccaggacagttgacgattgttgacgatttttgcatcaatattcatcagggatattggygtgaagttttattttttgatgtgtctttggttttggtatcagggtaatactggcttaatggaatgaatttggaagtgtttcctcctcctctatcttttggaatagtttgagcaagattcttctttaaatatttggtaaaattcagcagtgaagtgatcaagtcccaggcttttctttgcttggagactttattacagcttcaatctcattatttgttattgatctgttcaggtttttgatttcttcatggttcagtcctggtagattctatgtgtctaggaatttatccatttcttctgggttttctaatttactggcatgtagttgctcatagtagcctctaatgatcctttgaattactgcagtattagttgtaatgtctcctttttcatctctgattttatttatttgggtcttttctctttttttcttagactagaaaatggtttgtcaattttatcttttcaaaaaccaactttttgtttcattgatcttttgtattgttttcttcattccaacttgatttatttctgctctgatctttattatttcttttcttttactaattttgggtttggtttgctcttgcttttctagttctttaagatgcatcactttgggaggccgaggcgggcggatcacgaggtcaggagatcgagaccatcctggctaacacggtgaaaccccgtctctactaaaaatacaaaaaattagccaggcgtggtagcgggcgcctgtagtcccagctactcgggaggctgaggcaggagaatggcgtgaacccgggaggcggagcttgcagtgagccgagatcgcgccactgcactccagcctgggcgacagagcgagactccgtctcaaaaaaaaaaaaaaaaaaaaaagatgcatcattagattgtttgagggtattctcttttttctcgatgtagttgcttatagctataaactttcctcttagtactgcttttgctgcatcccacaggtttttggtatgttgtgtttgtattattatttgtttcaagaaatctctaaattttctccttaatttcctcattgacccactggtcattcagaagcatattgtttaatttccatgtgtttgtatagtttccaaaattttccctgttattgatttctagtgttattccattgtggtcagagaagatacttgatataatttcagtttgtttttgaatttttaaagatgcatttttttgccataatgtatgggctattcttgagaattattcatgtgttgaggagaagaatgtggatttcatagccattgaatgaaatgttctgtaaatgtcaattcagtccatttggttaacagtgcagcttggtcaatatatcttcgttgaatttctgtctcaatgatctgtccagtgctgaaagtggcatgtggaagtcttcagctgttactgtattggggtctgtctcttgctttaactctaataaaatttgttttatatatctggatgctccagtgttgggtacatatatatttacaattgttatgtcctcttgctcaatttacccctttatcattatgaccttctttgtctcttttgctagttttgtcttgaaatctattttgtctgatacaagtactgctactcttgctcttttttggtttccatttgcacggattatctttttccatccctttctttttagtctatatttgtctttataggtgaagtgtgtcttttataggcaacagatgattgggtcttttttttaatccattcaaccactctgtgtgttttgattggagagtttagtccatgtgtatttgttattattgataggtaagaacttactcttgccattttgttatttgttttctgattgttttgtggtcttctctttcttatttctttccttacttttttttttaagtgaaagtgattttctttggtggtatgttttaatttctagctttttactttttgttgtatctgtttatgttttttgatttgaggttacaataaggcttgcaaataacatcttataacccattattttaaacggatgacaacttaacattgattacataagcaaactaacaaaccagcacagagaaaactaataaaaactctacactttagcttcatccccctactttttaactttttgttgtttctatttatatctttatatctgaaaagttgttggagttatttgataagttcatcttttagtcttttaactccagatatgagcagtttacacaccacaattacagtgttatgatattctgtgtttttctgtgtacttactattaccagtgagttttgtacctttagatgatttcttactgctcactaacattcttttatttcagacggaagaaatccctttagcatttcttataggacaggtctgctgttgatggaatccttcagcttttgtttgtctgggaaagtatttttccttcatatttgaaatgyatttttgttggatatacaatttcagaataaaagggtttctttcctttaacactttaaataacaatcccgtttcctggcctgtaaagtttccactgaaaagtytgctgccagatgtactgcagctccattgtatttttgtttgtttgtttattttcttttgcagattttaggattctttcttcattcctgacctttgggagtttgataattaaatgtcttgaggtagtcttatttgggttgaatctgtttagtgttcttatagccttcctatacttgaacactgacatctttctctaggttcgagaagttctcattattatcctttcaactaaactttctacctctttctctctctccctcctctttaagggtgataaatcttagatttgtctttttgaggctattttctagatcatgcaggtgtgcttcattttttaaaatccttttttctttggtctcctctgacggcatattttcaactagccagtcttcaagctcactaattctttgtcttgcttggtcaactctgctgtcaagagagtctgaggcattctgcaatgggtcagttatgtttttcaactccagagattttgcatgattgtttttaattattctaatttcattgttaagtttatcggataggattctgattgtcttttctatgttatcttgaatttcactgaatttttttaaaacaactattttgaattctttgtctgaaaggtaacatatctatccctgtctctccaggattggtccctggtgccttatttagttcgtttggtgaggtcatgttttcctggatagtcttgatgctcttggatgtttgttggtgtctgagttaggtatttattgtagtcgctaaaatctcggcttgtttgtattcatccttcttgggaaggctttccaggtatttgaaaagactttgcccactttttgatggggttgtttttttcttgtaaatttgttttgagttcattgtagattctggatattagccctttgtcagatgagtaggttgcgaaaattttctcccattttgtaggttgcctgttcactctgatggtagtttcttttgctgtgcagaagctctttagtttaattagatcccatttgtcaattttgtcttttgttgccattgctttgtaaactagttcaaccattgtggaagtcagtgtggcgattcctcagggatctagaactagaaataccatttgacccagccatcccattactgggtatatacccaaaggactataaatcatgctgctataaagacacatgcacacgtatgtttattgcggcattattcacaatagcaaagacttggaaccaacccaaatgtccaacaatgatagaccggattaagaaaatgtggcacatatacaccatggaatactatgcagccataaaaaatgatgagtgcatgtcctttgtagggacatggatgaaattggaaaccatcattctcagtaaactatcgcaagaacaaaaaaccaaacaccgcatattctcactcataggcgggaattgaacaatgagatcacatggacacaggaaggggaacatcacactctggggactgttgtggggtggggggaggggggagggatagcattgggagatatacctaatgctagatgacgagttagtgggtgcagcacaccagcatggcacatgtatacgtatgtaactaacctgtacaatgtgcacatgtaccctaaaacttaaagtataataataaaaaataaataaattaaaaaaaaaaaagaaaagactttggttctgtgatctacgtttttaatccctgcagccatatctgcattaggggccactcaaagcccagtaatttcatggctgtttcagactcacagatgtatcaccttggcagtcttggatacaatctagaagaattttgtggattaccaggcagactttttttctcttacattctccgagacaaacgaacggacggtctctctctctccccccctccccgagcttcctggagctgggtgacgggtgacacaagcacctctgtggccaccccaccactaggactgtaccagatcagacctgaagccaggacatctctgagtcttacccaaggcccatggggtactgcctgggtaccactgttgattattcagggcccaaaggctctgtagtcaggagatgatgaatcctttcagtactgggaccttcccttcaaggcagtgggttttcctttggcccaaggtgtgtctagaaatgtcacctgggagctagggcctggaatgggggcctcatgactctgcccagtgccctatcctacttggctgagcagttatctaagttgtaagataaagtcctctttactcttccctctcctctcctcaaggagaaggaaggagtctcttttggagctgtgagctgtgctgcctagggttgagggaagggtgacactagcacccttagttgtgccagctagtaccttactaggttgtctgcaccccaagtccagtggctacaagccaagcacagcaccaggacttgcccaggaattgtagtccttccatcataggcagccttcaagtttatttaggaccccagagcactttagcccatggtggtgaggcttgtcagaactcagattctgaccactgggatgggtggtactgctctgtctagggctggtctaaatattccctccatgggctctggttgagttttgcctgttgtttttactgtgacagggcagcaccgagttccaataccaagtcccactatcactgtgctctctctcccaagtgcatgcgttctctctctggggcacacagccactgcagggggatgggtgaggggtgacatcagcaattccaaatgatcttttccaccctcttcagtgcctctttcaatgatatggagttaaaaccaggtactgtgaccactcacctgaaatttggttcgtatgaaggtgctttgctgtgcggacagttgttcaatttggtgttcctacagggaggatgattggtagaggcttctatttggccagctttctccactctcacccaagcctttttattactattaatgcagcagagcatcagttttctttttggcctagaagtttcagaaagctggaatttctgtaaggagatcttgataaactgcagtgagagggaggcttactttgctgatgggaccatcaacttaatgctgaaatgcaactaattgtgagactgaagcaagagctttggctaaatttccaaaatgatgacataatttttgcaatttttgtccacaggtttcacgtggcaggatgactatactcagtatgtgatggaccaggaacttgcagacctcccgaaaacctacctgaggcgtcctgaagcatccagcccagccaggtaagtgtggacgtggcttgttgctccttgctcccaggacacagtccatagccattacacttattatttgtttgtttgtttgttttaatgtagcaaagcacccaccatctttctggtgcagacgtttcagaaagttaggatgtctgtaaggaaaagtttggttcccatgagagaaagcgatattggggtgaccctccagtaagagacatgcccaggggttcttcgtttttccatgagactcttagaaaaatcctgcatcttcaaggccttggtcgaaagcagataagtcgagaattctcatttctcagtaagaaattatttttgctttagacaaaaaacagaattgtgaaagtctttatcatcctttcccagagcatagcaacgtatactgagctaaatatattkttccatattatcttattttgtactcaaaactatgtggtaattactaatgtcatacaaacgatgtggtaatgtcatacataccatggactaatgtcataccgattcttgaaagtgaggaaattgagtcatagggaggttaaaaaattagtctaaagacaaaccacagtaagaaagctggcactgtcggattcctgagccattgtgctatttttcatgttttttaaaaaaaaacatgaaaatgacctttcctaaaggtttagtttgaaaagttcatttttccctgacagacaattctagagtcatagtctttagaaagattccagtaacacaaaatttagatatctgctttcatgctcatggccatctgatagggaaagcagttaagtgtcctggcaggatcaagagtgagaacgtgtggagaactggtaaccgtcccccagcacgccgcacacactgagggcgcgggttgcctctttcctcagaacgcggcgcacactgagggcgggggctgcgtctttccccagcaagcggcgcacaccgagggcgggggcttcgtcttcaccacacggcgcacgctgagggcggcggctgcttctttccccagaacgccgcacacactgagggcgggggctgcgtctttccccagcawgcggcgcacaccgagggcgggggcttcgtcttcaccacacggcgctcgctgagggcaggggccgtgtctttccccagaacgcggctcacgctgagggcaggggctgcgtctttccccagaacatggcgcacactgaggttaggggctgcgacttcagcacgcggcgcacactgagggcaggggctgcctctttgtgcttctgtgcctggtgtatctacctttaatacctcctttatcaaagagaatgtgctgttatagtctgtaagacttttctgtaggaaaccaaacaaaaacccaccaaaatgttttcaacttgagctgtgttgaatttctattttggatgtgttcaaactccttatactcctctctaaattccactgggggcgttgtgcactgccccaatgaccttgaactccatcaagtatagggatgggttggacggccaagaagggcaaaaaatagagggctggaagaattgggaaaaccaagcaagggatggctcctcctcactctgggggggtgcagaacagggcaaacagaagctgccaaacgtgggaggaaaggggcgccacatagagaacaatccagggaggacctgcctctgagaaatcaaactcagcaacaaccatggagaggcgcctggattgtgccttctaaacaacgttaaatgtggtcatttggaaaaattgccagtttttattatttaaaacagtgccagttttattatgaaaaatggtatgttatctttgttttatgagttataagtgagattaaaagtttaaaatacatatgctttgagattggaattttctccttccttcctcccttccttccttcctttttctttcctctttctttcctcttctttttttttttttttttttttttttkggctcttgcttcatcacctaggccggagtgcagtggcacgatcttggctcactacagcctccacctcttgggttcaagcaattctcttgcctcagcctcctgagtagctgggactacaggtgcgcgccaccatacccagctaatttttgtatttttagtagagatggggttttgccgtgttggccaggctggtcttgaactcctgacctcatgatccgcccaccttggcctcccagagtgctaggattacaggcatgagccaccacatctggccgagattggaattttctttgtgaattttctgtatatggtctttgtctgtataaaaaggactttttgtatttttctgtttgtttcttttattataggttctttatatttcaggctagtaacttttcacatattatattttgtaaaaatatttttatcagcctggaacgtagatggcactagctatggttacaaataaaaacagctcttaccattctgtaggttggatttctaaattctttctttgtgagtgttgaacccaggcaagagcaattatccctgcccacaaaacagaggcccatttagggaggcattggctggatattctccagactcctttcctccacactcccttcccctgccctgctatgggcttcatgcctgtaagctccatcgggtcctctgggcctctggctttggtggggtttggaacaagctgcacccagcatggagggcagaggagtctgggcatgttccccagctcttccccaggcccagacatgactgcctggggacaatcactccctctcatgctgtccctcctgctgacccaaaggcctccccagtcctgccggtgccttcctcatgcccgactctgacacctactgagggaggttcccatgaggccctgcccaggagagaataagaaacagtgtggcccatcgtcttcctcaacagttgcccacagtatttcctcatggaaatgtgatcgtttttctttttttcctaacatttctggaaaacttcttttaccattgatctactttctagtatattttttaggaatgttcttcatttatagagtattttcattgtcttccacgattattggtaaaatatgcttacactgttgtgtgatttgggatatttataagctatcctttaatagcgatttccacatttgtaaatgcagtgtagtggatgctattctcttgttgatgaaaagagtcaaactctgtaaaatatttttagagatgtattctgagccaaatatgagtggccatagcccgtgatgcagccctcaggaggccctgagaacatgggcccagggtgctcagggtgcagcttggttttatagattttagggaggcgtgagacatcaatcaaatacattggtttggttcagaaggtgggacaactcaaagcaggggcttccaggctataggtgaattcaaacattttctggttgacaactcgttgagtttatctgaagacctgggatcaatagaaaatgttccagttaagataaaggattgtggagaccaagttttattgtgcagaggaagctctcagttagcagacttcagagaaagcaggttgtaagatgcttcttattggacctaaaagggtgcctggctcttggttgattatctcctggatctggaaaggaaggaaggaaaacaaaggggaaagtagatccctatagaatgtggatttttcccacaagagactttgcagggcaatttccaggtattgcaaggaaatatattttagrgttaaatattttgattttttccctttgtctcataatgttctgccagagtcagactgaaaagtcagtcacgatatatagggtcaaataaaacccatctgatgagaatttatggtttgtggggtatgacttcccagacctcttagataggaatttggacaagagaaaaaatcagagcttagttctcactattatggtttttaaaattactcagcacttgtgtagttatattcctttgcattgtaaacgtacgttttctttagccaggtgtggtggcgcctggctactcaggaggctgagagagaggatcacctgagcccgggggattgaggctgcagtgagtcatgatcacacacagcactctagcctgggagakagagtgagaccctgtctcaaaaaaaaaaaaccacttttttttcacccttgtaacatgatttttaaaaagaattatctcttagattttcttctttttgctgttctcttttaaataaaacttcttcagtaaaacttatttacgctatttattcatttttaaaaaaataatgaaatcacataaataatttgcttttgagcataattttaacatcattctataactgatgaattctcacttgcttttgttctaaattatctgtaattgtcattttatatccttttgaaacaataaatgtttggtaggcttttctactttttcatatttatgtgttgtttttaaacttcaaattagtgtctaattctactgcattttagtcagaatgtgactttgttcaacttttactctttggtaattttgaggttttctttggcctaattgataccatacttaatcttcaattggcgcttcaaaaatatatttgtataactatttgcaggatacagacttttataaatagtttataattatatatatatgatgtgtaattaggtaaaaatgtgtcaattgtattacttcaacatgtccttatttatattgtgactttctgaaatttctcagacaaaaacagtaatctgtgagttttctttgggggttgatgtgtttagcttcataggctctgaggctctgctgcttagcacacgggggctgcgtcagctcgtcctcggcgtccatcattagtggattgttgtttaaatggtgcctgcatctcccttaatgcttgttgtcttggattccattttcctaaatgagtagggcctttcctgcttcctctttgtttttgttgcctgattaatccatggctatcttcagaatttgacctttgagactggttctgtttgaaactcagcttttataagatcaagtggtgtttccaaagccccttgggtcaggtcggagggcgagttatagcagcaaggggactgattcctctgtggggctttttcttctcatatgtggattgtggcttgtttgccttctcatacgtggattgtggctcgtttgcctcttctttagtattcgtaattttgtcttattttggatttaatttgtggccatcacctctagattttcaagcgattttatagtaatggatttgtttcattcctcattaaagggatcatgttctgattcctgctgcatgataaggaaccgtgttggctttcagcatcctcactccccactcccaggagctgcttctaaccaggctcccctagtgcctgcctgtgcccttcaccagatggaccctgggccagcatttgttggataaatggtggtgaaggacagaatgcgtgatctgcccaagcctttgaattcttgcatgggtagctacactaacgaagaatgtcacctggctttctccactccatgtgtattcagagcattctgagcttcacagctgaacaagaatccaccatgggccagtgacatagtagctggtgttctttacataaggcagttaatctccmgagattgagtaacttgctgaaaaccaatcatccattcatgaaataaaggcgacattagaatgaagtcttcagaatccccagccctgtttttgggcttaccagagtggcaaccacaagctcatttctcctgctggttcttctcttcccacacatgaggtcccttaagcagartaagccccatgagagaaagccagaaagagacgcagtgtggaaaatcagcaaagcagtaggtatgagtgcccagtgtgaggaacagagctcgcacctaaggggtcaccaggaacctgagaacatgctaaaggctaagagaacctgagaaccaggaacctgagaacacgctaagggctaagagaccttgagaactgagagcctaagaacatgctaaggactaaggaggacctgagaaccaggaacctgagaacatgctaaagtctaaggaggagctgagaacatgctaagggctaagagagtcaaggaaggggaacctgagaactgagaacttgagaacatgctaagggctaagataaccaagaacctgggaacatgctaagggctaaggaggatctgagaagccagaacctgagaagaacatgctaagggctaaggaggacctgagaagccagaacctgagaagaacatgctaagggctaaggaggacctgagaagccagaacctgagaagaacatgctaagggctaaggaggacctgagaagccagaacctgagaagaacatgctaagggctaaggaggacctgagaagccagaacctgagaagaacatgctaagggctaaggaggacctgagaaccagggatcatgctaatggctaaagagaaccagggatcatgctaaatgctcctgaggcaggaacagggacaacaaataccagctgtgtatatgagcaccgatgacttcacagagaacttcaggtggccatgaaggttggatataaaacataagatgggcctgtaatgtggaattttttcctttaacaaactgggtgacaatctagactatctcatattatcgtgagcctaaggccagtgtgtgccaatggagaagggaatagctactaagtgtaaaacatttttcatctttttaaagtacaaaattcatacgtatgaagttttgacctacttcaagctggatgacagagcaaaagtcaatgtgcaagttaattgctacaacaccacgcggcataatgataaaccctctcattgccgtaacatactgcagcatcacaaacaagtccccaggcatggacagaggcgaagcaaagatgaatacgacaatttaaagatacatttatgaggtggttccatttgcattgattagcaattagtgagaaaagtagacaaaataccagaaaagtaaattaactgcagttaaattacactctgacaacatagaacatgaaatttcattaattaaaaaatggccaaggaaattatagccatgatttgagatgcaaagaactgcaaaagccttggtaatttatatgcctgttacatctgtatcagtgtaacttgaaaagtgatattgtttggctgtgtccccacccaaatctcatcttgaattgtagttctcataatctgcacgtgtcatgggagggacccagtgggaggtaattgaatcatggaggtggctgtctccatgctgttctcatgatagtgagtgagttttcacgagatctgatggttttataagggactctttcccctttgctccttgcacttctctctcctgccaccttgtgaagaagggtgtgtttgcttccccttctgccatgattgttacgtttcctgagacctccccagccatgctgaactgagtcaattaaacctctcctttataaattacccagtctcaggtatatctttatgagcagtgtgggaacaaagtaatacaaaaaggcactagaaataaaaacatggtgggtttatcaattgagataatcaagcaaaaatgggattttttttataagccccatgcaggtatcacacacctaatgttagtgatctgttcttgaaaatcaacatcctacatggaaacagtacctggaaacctattccattactgtatgtgggaaatttgtaatgagttccacatccactcaagccccagtgtatttcctaaagtgtttctaaatcacactaaagacccatatacaagtaccagatggtcatgtttggatagaagacacttcttgctgatacccagaagtggaaattgttcttagcaaagtgtatgttctatttgaagtaatactgcctcactcagcacctgcaaagtctgagctgcacctccctcaggctgttgggtgatgccacagtgctgtgtttggagacatacccagactttttctgaatacgattttgttcagaatgtagcatcaaattctgtgaaaggagatacacatgcacacgcacacacacacacatacatgtatatacatatatacgtatacaggtgctccttgactcatatctacctcctgtgcctgcctagggagcctgggctgttcatatccctcattgtggagctctgctggggatgatgtccttcagtgtcgtatttctaagagagccataagtctacctttgtatttgaaggatattttcatgggatatagaattctgggttacttttttttctttcactactttaaaaatgttttccatcgtcttctggcctggagcacttctcaaggagaaatctatagtcgcctttccactggcatcgggggcactggattgaagtcccccaagatcctcactagccgtgggcagggccccaggggtgcccggggagctacatctcggttgggtgtctggacagcagactctgtagtcctgaagtccaaatgcagggtcttgggaagacccctcatggggaagtgaagagacgggtttggccgaggagaggttggactcagtgtggtcatgacagaggcctcaggagccctcacccctcctcaggggctggggaccagtgtgggatgcagacctccctagatggggtataaacgtgggtgaggcagacccccatggtggagggccattttgggaggggacgcagctgtgtggcgatgacacttgcccccagctgcctcagggacagtggtgctcagtggcctgccagagttgatgagacagagctgaaggtctggggaaaccaaggcagcttgagttcacaggtcagagtataaaagagaagagtgcacagagagccctggagattttcagccactgctgaggatttggtagatgactgatgaccttgtgtctatgagggaaaagaaccatccaaaaaaatgagagcaaacagtatctgacattcacacagggtgcgacatagtgcttcttcaaacctatcaagacttgcaaacctcataatttccagataattgggtagaatgcccacagagtcctgtcttagtagtggggagtaatttgtcatagataattgctgctctgatactgccaaacaagacttaaaagtaagaaccgagagggttgaactggtcccaaggaacttaactgaatgccagagcaaaggtaaataatatttatgggattgcaaatgtccatcacccaataaggtaaaattcacaatgtgaatatatagacatggattatctggcatgaaaaggagcaggaaaatgcaactcataaaattcatcagtgtagacacagaactgacacagacacaataagtaggagacaggaaaatttcatgggtggaatgaatagcagattagacactgtggtagaaaatattagtgaacttgaagacacagcaataggaactatccataaggaaacaaggaaggataattaaaaaaaaataaaaaacaccagtgagctatgggacacatctaaaggccaaatatctgtataactggagtcccaaggcgggagagacaggaacagaaaaatcatttgaagaaataatgaggaaaattgtttcaatatgataaaaatgataaactcacagagccagaaagctcaataagccccctaaaaaagaaacatgaagactaagaaatatcataataaaatttctcaaaaccagtgataaaaagccaaccttaaaagcagccagaggaaaaaaaggtgcatttcatagagagatgagatgatgaaggccactgcaggtttctccttgagaatgctccaggccagaagacgatggaaagcatttttaaagtactgaaaggaaaaacaaacaaacaaacatcaacccagaattccatatcccatggaagtatccttcagatacaaaggtaaaattattggctttctcagaaatacagacgctgaaggacatcatcacccacagagctccatgaccagggctggtaaagccgccgttctggcagaagggaaaggtgccagatggaaaccaatgagagaacacgcgaaggcaactgcatccaccgatagatggtgttttcctgtcacttaaatcacatttaaagaagttgattaaacaaaaatgatgaaagtgtattgtgaggttgataacatagctgtcaacagaattcatgtcaacaccgcatcagagctggagggagaattgcaaggatctatttaaggctcgtatttcatatgttaagtggtgtgatgtcccttggaggcaacctgtggtcagttaaacgtgacwgttatacactatctgtaatttgggcttcttgccctaacgaggatctagacttagatgttgagaaggtgaaggtggagccatgccccagggctctgaggcagccagtgcctgggcgctcaggaaagtacctgcctccacctcggacctagcctctccctggcctgagagaagcagatggcagctgaccgcacctgtaaagcctgttatgagggaggcctgagtcttgtgctggcagtggggcatgrcgccggggcctgtggcgtctggaccgtccactgcagcacaagtcggacctgaagtgattggtcatcgctgagcatggctctcagcgggaaggggatttgggagcattgctgagggcggcaggttcacagagggccctgcccttgtctgtgggcagcagagccggacagcaagggcccccagactggcccatctttttaatggtgatgcccgttcttttatggacataaatgacgcactcaattaattatacaaactaaaaataaccagaattaaaagctctttggtctgtgtctaaactccatgtctacgaaatctttgcattttattagaagcatggtgtgtgcgtgcaggcgcacacatacacagacaaacgcacacacgcactcacacccctcacacactcacacacacacttacacaaactcacacacgcacatgcgcgcgcgtgcacacactttttttgttgttgttgaaacagggtcttcctctgttgcctgaggctggagcacagcggcgctatcgtagcttactgcagcctcaagttcctgggctctagtgaccctcctgcctccacttcccaaagtgccaggattatagctgcgagcccccatgccggcctcacattatattccttttttttttttttttttttgagacagagccttgctggaatgtggaggtggggtgcagtcactcacgcaggtgttcttaaacctggctggtagaggcgtctcctatgggaattatcttccttatttaggagcatgctctgggcccttttggtcatgtgcraaaaagcaaaggcctccrtgggggctgtgaagctctgggcggctgagtcctgggtgcagagaccagcggcagagtctgcgggtgagctgggcagggagggccatgcccatccctagggaggccatgcccatcgtgtcccaggctgagacgctgccccgtggctcaggcaagctctccgccacagctgagggtaaagggggacagggcgcaggctcagggggccacggacatcctctgtgcatgcccaggcctccaccagggctccccataaacatggggagtcctgactctgtctctccggggcctgttgggcgttaccgcgacttttccagkgaatctccctggttctgctcttcctttccgtgtggctgcacaagctggtgatgggggccccactggcaagtggctgctttctcagggactctgagcatcattagtgggggccacatgtggctgacasgtccagctgcctcctggatttatgccttcagcacgcagctgtcccatggggcccctggccagccgtgcctggttcttggccttgtcctcgctggccctacccctgccgccctcagcagggtgggcaccacatgtgtctgcccacgggaagcgtcccatgtgtttgtccttctagcctccggcgtccctgccctgcatggtgcacgcgatggcggtgcgtgaatcactgtttaacagcagggactgcagcggaggggctgagagcactgcatggacgtcccgaggctgtggcgaagtacatcaacctaaggcctaaaacaatgcacatttatcaggcgagaacctggttcctgccttttccagcttctgggccgccaccttccttggtctacccacaaacccagcagaagccatgccaagccttgggccccccatgcccacccggcctccggctgcctcagcctcctggagaattcctgctgagcctgcagccaacacctgcagcttcctccctttctcccctccccttgtttcccatgtattgcttttgcttcctgtcttctgctctcagcaggggtcaatcgtccatccccacaaccacgaggcaggtgctgttagccatcctcgtgcaggacacaggctcgggggcccgggagaagttcaaacccatggtcatggagcagcaaggccaggccggccaccgagagcccggctcccagccccttgcatgcacccaggcaccacaggggacagagcagctccaggcaccagcaaacatgcggttgatgtctggtttcttttgctttttcaggccctcaaaacacagcgttggcagcgagaggaggtacastcgggagggcggtgctgccctggccaacgccctccgacgccacctgcccttcctggaggccctgtcccaggccccagcctcagacgtgctcgccaggacccatacggcgcaggacagaccccccgctgaggtgacccttccacttcctccccgggcyggggttggcttttccttcagggtgcaggtacctgggcatgtttccttagtcgctggctcctcttggctttgcgcctgtttcccgggccagcgggcatcctgtgaacagggcttcggtgttcctggggccccttagagcgacacctgctcccagtccagccacccccacaaatgcttagtcctctgggtgaggctctgtaggatctttcttgggacaaggtgtcgtgactccagaaagcccaccatttaaaccacagatgcacaccagggaggtagaggagataggtggctgctcttcaccctttgagaaaggatccgggacagcagtggacactgaaacctgactgaggtagactgaggggccatgaacatggctggaattagggggcaccaggtgcaactactgcatccaaggaaagctcctgytccccggcaagcctgccccgggggcagcccagggcagcgtaagggctccatctgcctgtgggcatgagggtctgggcaccaaaacacaaggtgatgccctgggcacacagaccccagacaggctcggaggcgaaccccaggagtgtttatgcagggcgagtgggagctgcaaggacccgcatcacagagccacccaagacccttcactatgcgaagcccactcaacatcttaaggacacggaattaggaatctcagtaaattttgtaaatggaaaagcaggcatgatttttatgacgacttgttaggccagagttcacaggtcccacattgcctggaaagagggagggacaagagctgcagaaatcacctttggagcccagccctgccagcttcctgggataggattttggaccaggtgttgaggcccaggatggccctggggacattgggggtttgatggcgacgctcacacactccttttctgccaaacgttagttacatcagctctaatttgacacactttcctttctaagatggaagccatgctggtgtgagacaggaaagcctgaggaccctctgcatcctcttggactccactggggtctcaccaggagctgtggccctgggatatgtgtgggaagcaatgtgggcccagtttctattatgttcctgccatcgagccattgaaatgacttaagttaactctgggcaacccccacagacctcgaaaggtagagtcctcccagaggacgcgtggccactaagctcaatcccaggccagcttaggggcttcctggaaccttgcaccaagcgtgggaaccacagggtgagtttccacagaagttggccccacaaggtggcacgttctgtgcaggcaggtgaggaagctgaggcacttctgtgtcttagcaggtggtgcctggggaaggcccggccttggccccatggttctctggagcctttccgagggcagctcctgggcagccatctttgctgtggccttgcctcttcaggaggatgtcacaatgacgtttgaatgcagaagccagtctgtccacggccgccaaacagagccctgatgctggcccagagccatgcaggggccacggggtgccagacccacaggccacagttgagaggctgctcaggagggcccagtggcacctgggccatatttgtgtttttcctgatcatggactgtgtttcctggttkgttgaaatcacccctcatggtggagggtgggggtcttcagccctcgtggaagtacagggtcacagggctctgtgggccccaggtctccctctaaggttaggctcacaatgaaaggccagtcccagccctgctctgtgccaggcccacctcccatcaggaccactggctggcctgaaaaacatgccccaaagccttccaggagcctgtgggagtctctctgtgtgggcctaaccctagagggtctggtccacttaacactattttaaacaggctaaatttaaagtttttattcattaactgagagcaactaagcacgtctggtgygccagacatcctgctggattttgtggatgcagaaggtggatttcatgcagctctgtccttgggtcagaggctcctccacccactgctctggggccagggggagccgctcagcttctgtgcctcgagtcctcagctgtaaaccaggggtagtggccctggaggtgtcatgagagccacgtgtgaagctcctcatggagtgcccagtcagcaatagctgtaaccgtaactatcgttgataaaataatctttaaaaaatgaaatagaaattaggtygagagtctgaaccaggctcagtggaggtctccgactctgatgagaggaatcagagggcgccaggacactggcaaacatattccctccgcacacctgtgcctcggcaccacagagcaggtctcagcacagcacggtggaaactggcatttctcccaccctcttgaacgttggtaatttagcacctccagctctgaaatcattgctttgtcctcctcctctgccccgctgtgtctttatcagaagggctgtggggccctgtgctctgcctccactgctgctgggagatttcaggcttctgtaacggcgccgtgacgtcacgtccccagacgctggaagtgaatgatcagtaaagtaacccacgtgcagtccagagatggttttagtaacatacgagggaagggggaggcgtcattaaaagtttcagagactcggaagaagtttgagagaagggaaatcagttgacacttttctgtgaagcagtttcctgtctttcccccctgacttgacagtggcgtgctcacctagactgacgtccaagggccctcttcacgggctactgaatagagaaaggcaggagcgtagccttggaggctcatccaatgtgccttggatgggccagtgagcgagtcgtcacctgcaaacagcatttggtttcattcaatgggagcctcagttgttccattttgaacccatcatcatgctcctccttcggtttcagttattttattaaatagccctggcactaaaataaaagagtcagagttagaatggaatttgcttgtgggacaaggcgcagcatggattcgcctcgagggtaaatggaatggctgcagtgcttccctgccctcagcagccagacgtgaggtcggccaagcagccgcaacatccacgcattagaaacaaaccgtagcaaattgcaggaactcgttgagagtgaaggtctttggtagatattgagcaattcgtgctatgagccattgggaggtatcctagtgatgccccatgagagggctcatagcagcccctggggaaagcaagttcctgccagagacaggatgccttcctaggccgagcacagtgtactgcatgtcctgggatgctttccaggtgctcagtggttctgctggactcagcagctcagtgctcattaggccaaagggcccgtggcctcgtcacactaaccagttgtatttactgaagtctttccattcctggcttactgcactaggattccagcaccagcattctcaacacacgccccggagtgctctggaagcagccttccccatacagcgggcgagcgtggcggccttccccatacaaggcggcgagcgtggcggccttccccctacagggggcgggcgtggcggcctttccagtacagggggcgagcgtggcggccttccccatcagggggygagcgtggcggccttccccatcagggggcgagcgtggcggccttccccctcagggggcgagcgtggcggccttccccatacagggggcgagcgtggcggccttccccatcgcggggcgagcgtggcggccttccccatcagggggcgagcgtggcggccttccccatcagggggcgagcgtggcggccttccccctcagggggcgagcgtggcggccttccccatacagggggcgagcgtggcggccttccccatcaggcggcgagcgtggcggccttccccatcgcggggcgagcgtggcggccttccccctacagggggcgagcgtggcggccttccccatcagggggcgagcgtggcggccttccccatacagggggcgagcgtggcggccttccccatcgcggggcgagcgtggcggccttcccagtacagggggcgagcgtggcggccttccccctacagggggcgagcgtggcggccttccccatcaggcggcgagcgtggcggccttccccatcgcggggcgagcgtggcggccttccccctacagggggcgagcgtggcggccttccccatcagggggcgagcgtggcggccttccccatacagggggcgagcgtggcggccttccccatcagggggcgagcgtggcggccttccccatacagggggcgagcgtggcggccttccccatcgcggggcgagcgtggcggccttcccagtacagggggcgagcgtggcggccttccccctacagggggygrgcgtggcggccttcccagtacagggggcgagtgtggtggctgcctctgcactaggacatcccttccgttgggagctcgtgacggggccactgggggttcatctcttgggttgcgaccctgccgctccccagggctgctgggtgcatggaggaggagcatcttccaccactgcccccatcttgcctgctctccatttcaagaaagaggaatgggagaggggcgtgggcaccggtcatgtcaaatattccaccagcagccagggtccaccttctgataagtttggctgtgtcaccttggaatctcctacacacgatggtcggcctcacagtcctggtctctactgttactcagcataattatcaggaagtcattctttcccactcggaggtgtcccagtttgaattaatgagctccgtggtcattccagcacacagacatttagcacagctgtcaaacggttattcagaaaatgagcacttggtggcattttggcttaggtatttttcttctttgttaagatagatgcttctcagtatttaaaaaaatgcatgaaaacccagaactcattttcttttctgtccagtgtttaaatgaggagaaagctcttagtcatcttgctaatgaacaaagactgaataagcacaggaagtgcgtgaccggaggctgcagcgctgccgtgcagattttgctgccccgtaaatatagggacttagagatctgggccccggcttctcccctcccctctcagctgatgaaatattttaattggaaatttaagctttatatactgacgatctttgaaggtacaatcaacttcctgtgaattattttataaatcattgttttctatgtacccatcatcaaaaatgaaactctagcgtagatggagaaatatcctaaacatattgcctttcagggccttcatgctggtgacgtcataacagaattattttattttattccactgggaatataatcatgctctttctctttgttcattagcgagatgactcagagctttctcctcgtttaaacactaattgagcacttattgatcactaaatcaaggtgtcgttatgacttctgcattgtgagggtggtaacgcttcctgttttattgactatggtagcaccagttcacagtccttgaactcatcatgcagaacaccataaattccctgtccactctgttactgaggaggtttagtcagaaattcattacttaccaataccattaactagctgatttatcttggaaatgtttaaaaaacatatttaacatacaagaaatggtgctagattaaggaaatgattaaggaaagttagtttctgtcctttaggattttacagttttgctgggtaggagggagaaaacaagcaagcaaaaaatataattaaaaaattaaagcaagtgctgtgatggagggaacacagaaagtaaaggtgcactcatgccagagggggcaggtggcccaggcgggcttctgacagagggggcaggtaggcccaggcgcgctcatgccagagggggcaggtggcccaggcgggcttctgacagagggggcaggtgggcccaggtgcgttcatgccagagggggcaggtggcccaggcgggcttctgacggagggggcaggtgagcccaggcgtactcatgccagagggggtaggtggcccaggtgggcttccaagaggacggccttgggggacgaccaggagacacctcctgcaggtgtacgatggacgtagggtgcagagtgtcaggagcccattctcctcccaccccgaccacatgagtgagcccccgggagaaatctgccaggagactatccccctcccaccccaacaacacgagtgagccccaggagaaatctgccagagctgaggacacaggaaaagaggatgaactgcattccagaaagggatggatgaacccattccaaggagaggagaccacagcttctttcatgcgcattggaatggaagaagcagaagccagtcacaggaagtggggagaattcggcctaaattttaagaaactcttgaggtgcatggaacagatttgagagacaggctgtgcaaagcgagtgtctgcacccccgcctctttcctgtgggctttcgctgagtatgtgagatgcggcactagggatggaggagggagagggctgggagaaatcctgccaaggagcaccaggcctctatggagtgccccatgtggccttctgaagactggggacaagggagcatggtggaaaaagatctgttgaatctttctaagggtgcagaaagccagggtgggaccgacggggaagagaagcttcagaaactcacaaactgacacttggaccataaagcagagagctcccccatggttcagaaacctggcggctgagtgcagagcataaagggatctcgagtctcactggagcccagatccaagcctgggcgaagaaggcaacttagacccaaaggatggaaaatgtgtacgatggaaactcgaaaggcaggaaagctggtgtggtcatgttaatattagacagagtggacttcaagactaaaagtgttattcatgacagagacactttatgatgactaaatggtcaattcattaagatgctatagaaaaatgttatgaaccaatttcagagcttcaaatacataaaggaaatatatgagagtactaaagagaggaacatacaggtcgatcatgatcattaatgattgaaactctcctctgtcagtaactgattaaacaaatagataaagtatcagtaaggatagagaagatttgaaccacagcattaaccagtctaagctaagtgatgtttatagaatgatacacctaaaaactgctaaacacacattctttttgagtatgttatatagaatatttcccaaactagatcaaatgctgggccataaaataagtctcaataaatgtcaacagatcaaaatcatacagagaaagattttaaaagaaaactgcagattattattcttcagaaatatagaaacaaaaattctaaacaatttttatcaaattaaattcaacaatatataaaaaagaatactgcatcataatcaaggcagatttatcccagatatgcagggtatatcgaacatttaaacatcaaccaacataactcaccatagttacatagaccatgtgatggtctcagtagatactggaaaaagcatttggcaaaacccagcatccatccatccatgacggaaacctacatctaagattacatcaactggtgaagggctgaatgctttccacttaaaatctggcattagacgaggatgtctgctcttacctcttcaattcaacactgcattgaagatcttttttttttcttttgagacggaagttcattcttcttgcccaggctggagtgcagtggcacaatcttggctcactgcaaccctctgcctcctgggttcaagtgatgctcctacctcagcctcccgagtagctgggattataggcacccaccaccatgcccggctaatttttgcattttcagtagagactaggtttcaccatgttggccaggctggtctcgaactcctgacctcaggtgatccactgcctgtcacattgaagatcttagccagtgcaataaaacaagaagaaatgagaggcattcagattacataacctttgtcaaaaatttggtggaacctacagaaaagctactaaaactagtaaatatagcaatgctgtagagtgcaaagtcagcacacaaaaattaatttatttctgtatactagcaacaattaaatatgaattttaaaaaatatagtagcatcaaaaattatgaaataattgaggttgaatctaaaatatgtgtaagacaatgtacaatgaaaactacaatacattgatgagaacaataagacaaattaatggtgatatatacatggtcatgtgtctaaagactcaatagtgttaaggtagaaattacctccaaattggtatcaatatgatacaaaaacacaatccttaaaaaaaattgataactagaactttgtcaaaatttaaaaattttcttcttcaaaagaagacacttcttcgaaagacacacaaaagacaagccacatacttagaaaaatacttgcaaatagcactttttaagataaaaaatttcagaatgtataaaaatctctaaaaactaaaaaagcagcacattaaaaatgggcattttttttcaagacagtggattagaagcggtgttagcatgcctctcccacttggaaagacaaaatagtgtgtaaagattcacactgtgaacttttttccaagaagcgacaccagaacttgacaggaaaactaaaagaaaccacagaacctttgaaagaagtggcaggctgcagcctacactgtgagccaagcaaagaactgtaagccccacagtgtgagggggagacactgcctccaagatatgcacccccactggagaattcagcccatgggggcgggaccttaaccctaccaagtcctggaactgatttagggagcagtggagaatataaagtaggagaagcagtagaaagagccctgtgtgcattcccagtctccagcatggaytggggaagccattctgcctcacaggggaccttgcggaagtctgccaaccaactcagtcagtggccacgggttgagagaagctcccaactgaaatttgcaatctaatcttgagtggggacaaactcccttggccataacccaggggggagtgggaagcacgctgcagccacaaacacaggatctgggagcctggctttgctgctggactgggatagatgtggtctgaaagccacacttcctgtctccatgatgattgggacaatatctcacatctcaatattagtgttgaatgtaaatggcctaaatcctccatttaaaagataacagattggtagaatggataaaaagacacaaaccaaatatctgctatctcaacatagtcacctaacacataaagatgcatataaagttaaggtaaaggggtagtaaaatatattccatgcaaatggaaaccaaaagtgagcaggagcattctaatatcagataaaacagactttaaagcaacaacagtaaaaagagacaaagaaggtcattaaatgatgataaaagggccaatccaacaagaagatattacaattctaaatttatatgcaccaaatgctggagctctcagattcataaaataattactgctagatgtgagaagtgagataggcagcaacatgccaacactgggggacctcaatacttcactgacagtacaggacagatcattgagacagaaagtcaacaaggaaacaatggacttagtctacactctagaacaaatggatctaacagatatttacataacattctaatcaagaactgcagaatatacattctcctcatgagcacatggaacattctccaaaatagactagatgaagaaaatgtggtacatatacaccatggaatactatgcagccataaaaaggaatgagatcatgtcccttggagggacatggatgaagctagaagccatcatcctcaacaaactaacacaggaacagaaaatcaaacactgcatgttctcacatataagtggtagttgaacagtgagaacacatggacacaaggaggggaacaacacacaccagggcctgctgagggttggggggagagtggagggaaattagaggacaagtcaataggtgcagcaaaccaccatggcacacatatacataggtaacaaacctgcatgttctgcacgtgtatcccgtctttttagaagaaaaagtaatgaaacaaaaaaagactgtatactaggctacaaaacaagtctcaataaattttttaaaattaaaattatatcaagtatcttctcagaccacagtggaataaaactagaaatccactccaaaaggaattttttaaactacacaaatacatggaaataaaaaaatatgctcctcaatgatttttgggttaacagtaaaatcaagatggaagtttacaaattctttgaaatgaatgataatagtgacacaagttatcaaaacctctgggatatggcaaaagcaatgctaagaggaaagttcaccgtgctaaatgcctatatcagaaagtctgaaagagcccaaagtgacaacctaatgtcacacatcaagtaactagagaaatatgaacaaactaaacccaaagctggaagaagaaaataacaaagatcagaacagagctaaatcaatttgaaggaaagaaacaaatacaaaagatgaaacaaaaaattggttttttgaaaatataaacaaaattgatggaccattagctagattaatcaagaaatgaagagtgaagattaaaataagctcaactataccacagaaatacaaaagattattcacgactattatgaacacttctatgcatacaaactagaaaatctagaagaaatgaatacacgaatatattcctgcaagcatacaaccctcctagattaaattaggaaggaataaaaaccctgaacagactaataacaagcagtgagattgaatcagtaacttaaaaattgcccataacaaaaaaagcccaggaccagatggattcacagctgaattataccagacactcaaagaattggtaccaattctactgaaactattccaaaggatcagggcagagagaatcctccmtaactaattctatgaagccagtatcactctgacactaaaatcagggataaaataatgaacaaaagcaaactatagaccaatatccctgatgaacatagaggcaaaaaccctctacgaaatactagctgactgaacccaacagcacatcaaaaagataataaaccatgatcaagtgggtttcatcccagggatgcagggatggtttaacacatgcaagtcartaaatgtgatacgtcacataaacagttaaaaacaaacaccatacgattatctcratagatgcaggaaaagcattcaataaaacccagcatcacttcatgataaaaactctcaacaaactcggcacagaagggacttacctcaaaataataaaagccatrtatgataaacccacaaccaacattatatggaatggggaaaagttgaaarcatcccccctgcgaactgaaagaagacaaggatgcccactctcaccacttctattcaacatagtactggaagtcctagccagagcagtcagaaaacagaaggaaataaagggcatccaaaatggaaaagaggaagtcaaactattgctgtttgccaatgatatgatatacctacaaaaccctaaagactcctccaaaagactcctagatttcataaacgaattcaggaaagtctcaggttacaaaatcaatgtacacaaatcagtagcagtgctatataccaacaatgaccaagctgagaatcaaatcaagaactcaatcccctgtacgagggcttcagaaaataaataaaatacctatcaatatacttaaccaaggaggtgaaagatctctatacagagaactacaagacactgctgaaatacactgtagatgacacaaacaaatggaaacacatcccatgcttatggattggaagaatttcatgaaaatgcccacactgcccaaagcaatctacagatttaatgaaattcctatcaaaataccaacattattttcatatagcaccaaaaaatagcccaaatagcaaaagcaatcctaaacaaaaagaacagatctggaggcatcacattacctgactccaaactatactacaaggctagagttaccaaaacagcatggtactggtagaagagtaggcacatagaccaatggaacagaataaagaacccagaaataaacccaaacacttacaaccaactgatctttgaaaaagcatagaaaaccataaactggggaaaggacacctgtttgataaatggttttggtaaaactggatagccacatgtagaagaatgaaactggatctctattgatgcagggtaaggagccccaaagtggggcttagcccaccagggttcttggctttgcccaggaaagaattcaagggcaagctggagataaaagaaagcaaccttattgaaaaggcagtgttacaactctggcagtgttttagctctgtgactgctcctgcagagccaggctaccccataggcagagagtagcagctcagggaagctttgcagtcatatttatagctacttttaattacatgagggttaagagtggtttatgcagaaatatctagggaaggggtagtaacttttgggtcatcaggtcattgccatggaaaggggcagttactccttggtgttgtcatggcaagtgtaaactgacatggcatattggtgggtgagacttatggaaasctgcttccaccttggccctgttttaactagtcctcaatttggttcagtaacccagccckgcctctgaagttgagtcctgcctcctacctcattatctcttaccttatacaaaaatcaactcaagatggatcaacaacttaaatctaagacctgaaaccataaaacttctagaagattaagtaggaaaaaatcttctggacattggccttggcaaagagttcatgggtaagaccccaaaagcaaatgcaactaaaacaaaaataaattggacctaattaaactgaaaagcttcatatagcaaaagaaattatcagaaaacccacagaatgggagaaaatatttgcaaactatgcatctgacaaaggaccaacatccagaatctacaaggaactcaaacaatttagcaagaaaaaaaaatcccattaaaaagtggacaaatgacgtgaacagacatttcttaaaagaagatattcaaatgggcaacaacatatgaaaaaaatgctcaacatcactaatcatcaaggaaatgcaaattaaaaccacaatgagataccaccatactcctgcaagaatgactattattaaaaagtcacaaaacaatagatgttggtatgactgtggtgaaaagggaacacttatccactgcaggtgggaatgtaaattagtacaacatctatggaaaacagaatggagatttcataaagaactaaaagttgatctacccttttgatccagcaatctcactactgagtatccaaaggaaaagaaatcaatatatcaaaaaggcacctgtagatatatgtttattgcagcacaattcacaattgcaaagatatggaaccagtctaagtgcccattgactgatgagtggctaaaggtgcagtggctcacgcctataatcatagcactttgggcggccgaggcaggtggatcatgacctcaagagattgagaccatcctggccaacatgatgaaacctcgtctctactaaaaatacaaaaaattagccaggcgtggtggcgggtgcctgtagtcccagctacttgggaggctgaaggaggagaatcacttgaacttgggaggtggaggttgcagtgagctgagattgtgccactgcactccagcctggcaacagagcaagactccatcttaaaaaaaaaaaaaaaaaaaaaaaaaagaaagaaaatgtagtatatatatacaccatggaatactactcagccacgaaaaagaatgtaataatgtctcttgcagccacttagatggagctggaagccattattctaagtgaagtaactcaggaaaggaaaatcgattaccttatgttctgacttataagtgggagccaagctatgggtatgcaaaggcagacagagtgatctaatggactttggagactcagaagcgggagggtgagaggggagagggataaaaaaacctacatattgggtacaatgtgcattacttggatgatgggtgcattaatatctgagacttcaccactattaaattcatacatgtgacccaaaccatgcgtaccccaaaagcttttgaaatttaaaaaatgggcaaaagatttgaataaacacttcaccaaagaggataaatgagtgacaatttaatgtgaaatattcagtatcattcctcattatggaaatgaaaattgaaatcacagtgaaataccactacaaacctataagaatggctaaaatttaaaaaaacaaaatacaaactgaccatcctatgtattggcaaggaggtggaggagctggacctctcatatgccaccagtggaaatgtaaaacattaacaacgatttggaaaacgtcttgacagtttcttcaaaagtgaaatgtttacttgcctgtgatccctccatcccacttctactcaagacaaacgaaagcatgtgtgcattcaaagatttacacacgtatcttcatggtagctttcatagtaaatgcccacaactgaaaaaacccaaatgtctatcagaaatggacaaagaaattttgtttgatccacaaaatggaatgctactcagtaataaactggagtgagctgttgatgcatgaaacagcacagtgagtctcatttctgttgaccaaaagacaaaagaggagctattgttataattccagtttggaaagctgtagaaaatgcaaactgggttataagggacagaaagctggtcgggattgcctggagctgtggacagggatgggagagggcagtgtctccaggggcaccggaatgtattcagggtgacggacgtgttcattgtcatgcctcctgtactgtttattgtatgtcaattatatctcagtagtgctccaaagggaaaagaggcaagcaatcccatgcaaaaatgtataaaaactttgaayggatacttcataaaaagatatacaaatggccaatgaaggcatcaaaggtgcttagcatccttattcacaaaaccataaagaacaaccacttcatgtcactagattggctaaaattaaaaaaaaatccataaaaccaactcttgatgaggacatagaaattctcaaattagsgggaatgcaatgcaagctgttataacctgtatttggaagctgcttaaaggctaaagatacgtctgtccttggactcagcagttcccctctggatgtctatccaagaggagggacgcctgcattcacaggaaagctggcccatgactgcccacagtggctctatccagaacagccccaaactgtcaccacccagatgtggtcaacaagcccaccttcccctatccctgtttctggaggrgggccacctagagagattgtgcagagatagcacagcttccctcacagccctctgcttagccatgccacctggaggagcaggtgtggaggcacacagcgatgaggaccgtggcctccacatgttggatgccacattcacgatgtccatttgagttttttaaaagtttgccccctcatgtgattgttcttatgacctttggtgggaagcggagctctggtggaaaattggccccarggcatggtgttctgctcccagcatacacagtagcatctgaggcagagcaggttgatgcatgctggccaccgtcatcctgactgtctcccctggtttcctcccagacagtcctgtccctgccctccactgaacactcacagtgacagctaccacccaccctgcactagcagtccctccacacccagacctgtgctccatggaagccgacctgcttacggttcctctgttcactcggcgtgtttggtgtctgtcactcgacagacatacacagcctagggagaagggctgcatcttagctctgccctttcctcactgcaggatcttctttcctcatttgcaaaatgtgggtaatcatgtctgtaccatcgagtcattgaaagggttagagaaaattaaggcatgtaaagccgaaaacagcctggtgtagcactcagtgaataagagccccgtggcgatgactgtccctccatcttctgggtggttatgagccaactgacctctaaccccaggccaaggtggacgggacatggattggaactcgctgctttaatcatgccctgtgcttttcacttgccaggtaggaggcttttgggtgcagcttctggaaaggccaaaacgcaaacaggagccagaagagtgacagaaggaagagtggcgggcaaagtagggtgggctgagagcagtgctggcctcacggcattgcgagtctcggagcagggcgggctgagagcagcactggcctcacgatgtcgtgagtctcagcagggcggggtgagatcagcactggcctcacggtgtcgcgagtcttgagcagggcagactgagagcagcactggcctcatggtgtcacgagtcttcagataattccagactctcagaatgcatcatcattagcagatatccaggagttcacattggcaccccgtgatactgtcaactcgctacaaatttgttgatcccaagtagtttaggacttaacctcttcaacctcatagattttgtgaactctgaaaactgtttggggtcttatttttcagtctgagagctctataccttggctgcagagatagcaccgtatacgctcgtgtgagacccccctgcttccctgaatgcaaaaaagttattttgtcttggcgacagcactgttggtaagaatgacaccacaattatttcccctccacacgagtgggccacttagagcctgagcactgttaaacactgacactttctactgtgttaagacagagacagaggcagagatacacagagagacagagacacagagagagacagagaaaataaatgagctgccagaatcacctctctaaggcccgagacagaaaggcacagtgaagtcatcccaaccccacattcacgagccggagccggagctgcagcgttcccacctcagctcccaaacctggccgcatccggtgccggctcattaggaagcctgtgaatagcactgaggctgtgtgctttgtcaggccggcagcaagcacgccgtgatcaaggtgcctgtcagtgctgccggcgggcagtgagacagggagaaaacgtgtgttatgtggtcaaaagatgtcccgacttgggcttcctaatttgttttggatcctcggtgcaggagaatagctgatgagcatgggcagagaccagtgcacacacaggagtctcctccacccagagtctcccggcatgtgggactccccggacctccaggccttcctgtcagcctgaactcataattgtgcctttgggactgggctgggtggatctccaggagaggcatgtttgtcaaaggaagaggcctgatttttagctctggtactcccggccccagtaaagttgggagcgaggagagtcacttcctcagcagtgtcactgtttgacaggtgaggggtatggtgcagggcgtggctctgtgaactgcatcagctggctccaggaagcagctctgatttcctccagctgaagagaatcacattcttccaaaaccaggattgcttttctgaccctttctaatagcattctttcaattacggttgttaatgtctatgactcaactcctagttcagtctgcaagatgtttgaggacagggccacatctgagttattcttccttcatagaagtccagggcttggcacacagcagcagtaggggtttgatgatgctgatggcgggggtgacactgatggtgtggatgctgctgtggatggtgtggatgatgatggtgctgctgctgctgmtgatgatgatggtgggaagctgatggttgaggtgatgatggcagggatcatgttgatggtggaagtgataatggtggggatgctgctgtggatggtgaagatgatgatggtggggatgctgctgtggatggtgggatgatgatggtgaagatgatggtggtggggatgctgctgttgatggtggagatagtggagatgatattgttgatggtggaagttgttgcgggaagtcagggaccccaaatggagggaccggctgaagctgcggcaaaacataaattgtgaagacttcatggacatttatcagttcccaaaattagtactttcataatttcttatgcctgtttttactgcagtctctgaacataaattgtgaagatttcatggacatttatcatttccccamtcaatactcttataatttcctatgcctgtctttaatctcttaatcccatcatcttcataagctgaggatgtatgtcacctcgggatcctgtgatgattgcattaatggtacaaactgtaaaacatgtgtttgaacaatatgaaatcagggcaccctgaaaaggaacagaacaacagcgatcttcagggaacaagggaagataacattaaggtctgactgcctgcggggtcgggcagaatagagccttatttttcttcttgcagaaagcaagtaggagaaatattgctgaattcttttcccagcaaggaataatcctggggaaggaatgcattcccaggggtaggtctatgaatggccgttctgggagtgtctgtcttatgcagttgaagataagagatgaaattctccctggtctcctgcagtgccctcaggcttaccaggattgggaaattccagcctggtgaattctagtcagaccagttgtctgctctcgaaccctgtttcctgttaagatgtttatcaagacaatgcatgcccagtgggacactcatcagtaattctaatttcaccccctgccttgtgatcttttattgccctctgaagcatgtgatccctgtgacctactccctatttgtacacccctccccttttgaaatccctaataaaaacttgctggttttgtggctcaggtgggcatcacagaacctgccaatatgtgatgttacccctgaaggcccagctgtaaaatttacctctttgtactctttctctttatttctcagactggccaacacttagggaaaatagaaaagaacctgtgttgaaatattgggggctggttcccccaataggaagtgatgatggtggggatgctgctattgatggtgggatgatgctgatggtgagggtgatgatggtgtggatgctgctgttgatgatggggtgatgatgatggtggggacgctggtggtgttggtggtgatgggatgctattattgatggtggagatagtggagatgctgttgttgatgattggggtgatgatggtggggatcctgctatggatggtgaagatgatattggtgggatgctgctgtcgatgatggggtgatgatgatggtggggatgctgctgttgatggtggaagtgatgatggtggggatgctgctattgatggtgggatgatgctgatggtgaaggtgatgatggtatggatggtgctgtggatggtgaagttgatgatggtggggatgctgctgtggatggtgggatgatgctgatggtgaagatgatgatggtgggatgctgctgtgaatggtgaagatgatggtggggatcctgctgtggatggtgaagatgatggtggggatcctgctgtggatggtgaagatgatgatggtgaagatgatgatggtgggatgctgctgtggatggtgggatggtgatggtggggatgctgttggagatagtggagatgctgttgttgatggtggagatagtggagatgctgttgtggatggtggagatagtggagatgctgttgttgatggtggaagtgatgatggtggggatgctgctattcatggtgggatgatgctgatggtgagggtgatgatggtagggatggtgctgtggatggtgaagatgatggtggggatgctgttgtggatggtggcagtgacactaatggtgataatgatactgctgatgactgccatttatcaagttcctcctctgagttgtgtgctgagcaaggcacttttacctatactctccctaatcctcacagtggcttttaaagaaaacagaattatttttctagttttgcaggtggtgaaaatgagacttcaagaggttagataactggtccaaacttacacaagttacacagaactgacaggattgggccagtctttcagtgagccttctttcctgctggctttttcagtgtgtgggcgagtgggttctgcttctcgtcatatggaaatgcagtgggttgaagaatattcccagtagaatatcatgtcagcttaaacatcatcagactttggcagaagctctcgaatgcttcatatccacagctgggctaccccagagatgctcagccggatttctcttacacatagtttgaagacttcatgcacaggaatgtccatcgcctgtactggaaattagtctgtgtctatgccgttaggctgctaatttccaggtttgggcagctacggtcttaaaaattattccacattgtcttaggaaacctcccttcattggtatgttgaactgagactgaaaacatcttcacaacagggggtttgaaaatgagtcacagaattttaaactcagagctgagagtagaagaaaaagtctaattggatagtttctcctcagttgagatgtggatttcctgactgctttaaagaatatgaaggtataggctgggcatggtggctcacgcttgtaatcccagcactttgggaggccaaggcgggcagatcacttgaggtcaggagtttgagaccagcctgaccaacatggtraaaccccatctctactaaaaatgcagaaaagttagctgggcctggtggcgcgtgcctgtaatcccagctgctcaggaggctgaggcaggagaatcacttgaacccaggaggtggaggttgcagtgagccaagatcacgccattgcactccagcatgggttacagagcgagactatgtcttaaaaaaatgtgtgtgtgtgtatatatatatatatatatatatatatatatatatatatgtatgtgtgtatatatatgtgtgtatatatgtgtgtatatatatgtgtatatatatgtgtgtatatatgtgtatatatatgtgtgtatatatgtgtgtatatatagtgtatatatatgtatgtgtgtatatatgtgtatatatgtgtgtatatatatgtgtatatatatgtgtgtatatatgtgtatatatatgtgtgtatatatatgtgtatatatatatgtgtgtatatatgtgtatataatgtgtgtatatatgtgtgtatatatgtatgtgtatatatatgtgtatatatatgtatgtgtatatatatatgtatgtgtatatatatatgtatgtatatatatgaaggataaggtaaagtaaataattgtaataatagtagtagtcatagccattaacacttccgtgccagatactattattattatccttgttttacagattacttaaatagtgtgctgaagcaaaggtcactaagctcgtagcattggtggtagtttaaacccaggcagctccagagccagttccttttccttggggacctcaaaccgtgaaagagccagtcagcgtgagaatacttttctttactgcccatgttcccaactctcaggccctcttggttatgggatggtcacctcaccttggtgagaaacaccccagtgtctgcaatcatctattgagtagccggagtggcttgcaaaaaccgatgtttgctattatttctacaggctctgttgtttgtgctaactactgaaatattctttttcctcttcaccttaatttgattcagaacataaaccaaaaatagattgtttatccaagtctactgcacagatcacactctgctgtgattgtgtaatgcactgaacctagtcagtcctgcacctggagcttccaactcaactttaattaaaggccctttgcgtggaagctccaggttactgcattcatagcaatgaggggaaagccacttgcaggcacataacgagggatttggacgcagatccccaccccccagcacggtggctgaccaggtgttcagagacagcctttgcaagagggagtgcaggctgagctggagattgacacttacacccaatttgtgggaaattgctggaggggctgtttgttgtggtggcattcactgtctctcgctcgctcgctctcgctctttctcacgctcttgctctctcacatattctctttcttaagggaagaatagttgatttcagctagtccttggacaaatttaagcaatttggatgatagctatagtcacatcactttagaaataataattaaaatatcttagagataatggctgggcacagtggctcatgactgtaatcccagcactttgggaggctaaggcaggcccatcacttgaggtcaggagttcgagaccagcctggccaacatggcgaaaccccatctctactaaaaacacaaaaattagcagggcgtggtgaagggcacctgtaatcccagttactcaggaggctgaagcaggagagtcgcttgaaccccagaggtggaggttgcagtgagccgagatgtgccactgcactccagcctgggcgacagtgagagactccgtctcaaaagaaaaaaaaaaatcttagagataatgtccgatttccttttttgacagaagaaaattgagtctttaggggtcaagtaatttacccaagttcatatatgagaactgaaatcagaacctaattcaacctggccaggcgcggtggctcacgcctgtaatcccagcactttgggaggctgaggcaggcggatcacttgaggccaggagtttgagaccagcctggccaacatagtaaaaccccatttctactaaaacacacacacacacacacacacacacacacacacacacactcacaaaagcagccaggtatggtggtgtgttcctgtggtcccagctacttgggaggcagagacataagaactgcatgaaccaaggaggcagaggttgtagtgagctgagattgtgccacttcactccagcctggatgaaagagggagactctgtctcaaaaaaacccagaaaaaccaaacaaccccaacctctatcaacccacttcccaactcccaggttgctactcaaaaatctaactcagaggatgaacccaaatattttcggaaatagccagactcaggagctggacccccttaccttactgtcagtgatggctgcacacccttagctagtgccgaggtgtccacctccactgacatgacattgatcatgtgccccaaggaggtgcaagtagaaaatatgaacggatgggatttaaactggggtgtccacacacccatgcacgcctccagggagctcagcttgtgtgtccaggattcgaaagtctctaagctggaaattattcatactcagcctgtccatgacattttgatgaagcccaagtcagaggtacaatgtggggacttttcacatttttacagctgccctagaggtgaggacagctgggccttggtttatctagtgacacaaagtgtgatgaggacatgtcctcttaacggaattttactaaatgagtgaggagaaaatatagacagaaatcccatgaaagactgttagccagggcattgactagtaaatgatgtgataggtaattatcgaacaagagaccctggcatcttccctgctgcagcacactgcagttaaaagagcaggcagcaaacatgtttcaggtcttcagtaaagaagttggagtgaagacctccagacaaggcacttgaggcctctgctgagggttgctgaaagagagattcagctattggggagcagcttttcagggttaaaataaaaaccagtgcaggcaaaaaatacaaacagacatttcttcagagaagatgtaggagtggtcaataagggcacacaaagatgcagcatcattagccaccagggaggcaccgccgagcctcatgaatgtgtctgggagcagctcctctcattgctgtgaatgcagtaactccgagctgccgtgcaaaggacctttagttaaagctgagttggaggctccaggtgcaggacatactaggctcagtgcattatgcaagtgacacagcacggtattgctttccaactgctaggacaaccatagtaaaaacagaaggaaagtagcaagtgttggcaaagatgcagaggaactggcatctgcatccattactggtgagattgtttgtggtgctgctgtgctggaaaacagcttgggagttcctcagtcagttaaatgtcgagttaccatgtaatatcctcgaataaacccaagagaattgaaaacacattgatacacagactcataaatgaatactcatagcagcattattcaaaatagccaaaaggtagaaaaaagcaaatgtccatcaactgataggtgaatttttaaaatgtgggatatacatgcagtgggatagtacttggctgaaagaggaaggatgtcctggcccatgccccagcatcagcatgggtgcacctgaggacattatgcttagggaaatgagccaggcacagatgccacacatggtgtgattccatttacaccaaacgtccagaagagactcctccatagagactgaaagcgaatgagcagtgtcagggtgggagggaggaatgggaacactgcaaagtctctttttgggtgatgcggatgttctggacttagtagtgatgtctcacaactctgaatacactaaaaactgctgatgtgggtgaattatctccataaagctgatattaaaaataatgcaggaacaaatatgaaatagggacctgggttggtcagtgtgaaaatgagagtcctgttttggctttacatttcagagatgtccagggctgtttaggaccttgaacctgagaccgaagggcatctttgtacccccagggctgtttaggaccttgaaaactgagactgaagggcatcttggtgcccccagctgacgatggaaatgtgactcttgctctgttttgctctcctttccttcagggtgatgaccgcttctccgagagcatcctgacctatgtggcccacacgtctgcgctgacctaccctcccgggycccggacccagctccrcgaggacctcctgccrcggaccctcggccagctccagccagatgagctcagccctaaggtggacagtggtgtggacagacaccatctgatggcggccctcagtgcctatgctgcccagaggcccccagctccccccggggagggcagcctggagccacagtaccttctgcgtgcaccctcaagaatgcccaggcctttgctggcaccagccgccccccagaagtggccttcacctctgggagattccgaagacccctccagcacaggcgatggtgagccagccccgcttggtgtttcttgtttgctgactgtcctctgtccagcccctcccagtgacagacgcaccatgctcttcccacacgtggggtctgcacaccgcactcccccgaggacgcgtggcaggaatggggcaccatgtagggaagggtcccttcggccctcataccctctctgtgctgggaaggagtatgtggtcatttcacgtcctgggaacgcagtggccagtgagaggcgggaggtgatcctgacagtgggatggagaaggcgctgctgagggtgtgaggacagtgaacacagcggccagtgggaggggaggtgatcctgagggtgtgaggacagggaacgcggcggccagggggaggaggagatgatcctgagggtgtgaggacagggaacgcggcggccggggggaggaggagatgatcctgagggtgtgaggacagtgaacacagtggccagtgggaggggaggtgatcctgagggtgtgaggacagggaacgcggcacccggggggaggaggagatgatcctgagggtgtgaggacagggaacgcggcggccagtgggaggaggagatgatcctgagggtgtgaggacagggaacgcggcggccgggggggaggaggagatgatcctgagggtgtgaggacagggaacgcggcagccagggggaggaggagatgatcctgagggtgtgaggacagtgtgtgttcccttctcacttcttgttcatcccttccccagattttatgatttcacaattctactgctgaagctgatggatggggcgggcaacatggcttgcaggacgggtctggcccacagcttgtgtcgtccatatctgttttggaaaattgactctgaacacgttaagtccagtgtcctttgtcgctgaactcacctctccctgtggcccagcatgtgaccgtagcccatatttatggcggtttgccacatcctccgaagccccctgtctggatttcatgctgctcaccatgcactagctgaacagtgtcggcctcgagrtgactgctctgccaagaccgtggcttccggtgtcgctacctgagttaagccacgtcagggcgggcccaggggagaarggcgtttgcrggttcctgcgactctttgtgatatggagaaggttccgacccatttatttcccaacagccttttcccaagaccatcctgcagtgggttctgataaaacatgacttcccttttggagataacaaatactaaaatttcacaaacattgcctgagcatcgcgttatgtgagcactctctgctccttaagtgaaggctgaatgggagccgctgagagcgagcatcagcttctctgctgtctgcagccgggagctctcctgccctcgctctttctttgttcatgcagccgttatggcagtttttaaatagaaggaatgtgaaattgcaattagagggaaggacgtgtgaccattaccgatgctttctccttgttcctctcttggaggagaaggacggcggaggaggccgatgctgcacttgagtgagtgctgctggagcattgatggtgctgtttgctacgggagctgcccgcctggagtggccactttccctccggcacctctccctstggggcgacgtctcctctgttctaagccatgctctactccgagaaaccccttttcttgatggccctgcctcctgcacttgcgtgggtactagacaccatcggggtcttcactgcctcctgcactttcatgggtactagacaccatcgggggtcttcactgcctcctgtcctctttgtgtactagacaccatcaggggtcttcactgcctcctgcactctttgtgtactagacaccatcaggggtcttcactgcctcctgcgctttcgtgggtactggacgctatcagggggtcttcactgcctcttgtgggtactaggcaccatcgggggtcttcactgcctcctgcgctgtgtactagacaccatcaggggtcttcactgcctcctgcgctttcgtgggtactgaatgctatcagggggtcttcactgcctcttgtgggtactagacaccattgggggtcttcactgcctcctgcactctcgtaggcactggacgctatcagggggtcttcacttgcgaccttgggtccgtgtagctgccgagcttcctgttctcctccagctcagtgtggcctcagcccttggccacaggcggtgaatacatggctgaggtgaccttcagcttctcatctcagccttccttgcccctccccggcaccggctgcccctctacctgcattctcccacctctatactccttctagtggggtcacgttgggtcgtcctcttccttctctaacctcccttttctctctcctatcccatctcccacagcttaaaaagccccattcacctctgtcctcattattgggaacagaaagcaataaacatcctcgcccccatcacagggagggaaacccagctggagagctgggtgagggtgagctcacagagagaataggacgcattcctgctctgcgtgccttccctacgcgcgcgctcccgctctgagccctccctacgcgcgcgctcccgctctgcgagcccttcctacgcgcgcgctcctgctctgcgtgtccttcctacgcaccctcctgctctgcgagcccttcttacgcgccactcctgctctgcgtgcccttcttacgcacgcgctcctgctctgcgtgcccttcctacgcacgcgctcttgctctgtgtgctcttcctacgcgtgcgctcttgctctgcgagcccttcctacgcgctcctgttctgtgtgcctttcttatgcaccggggagcttcacctccctgccttggcgccttctctttcctcccacaccccagggtgtggatcttcggaacaagcgtcctgaccgtgctctctccactctcccgtgatccctacgagttacacaatgtgcttggcattcttcctgagctaccctgcgatgctggtgatattctgataaaaactgacttccaaactgcactgtgcgctttagaaaagcctcatgtaaaacggcaaataggaaatacgcagnnnnnnnnnnnnnnnnnnnnnnnnnnnnnnnnnnnnnnnnnnnnnnnnnnnnnnnnnnnnnnnnnnnnnnnnnnnnnnnnnnnnnnnnnnnnnnnnnnnnnnnnnnnnnnnnnnnnnnnnnnnnnnnnnnnnnnnnnnnnnnnnnnnnnnnnnnnnnnnnnnnnnnnnnnnnnnnnnnnnnnnnnnnnnnnnnnnnnnnnnnnnnnnnnnnnnnnnnnnnnnnnnnnnnnnnnnnnnnnnnnnnnnnnnnnnnnnnnnnnnnnnnnnnnnnnnnnnnnnnnnnnnnnnnnnnnnnctatgaaatagaattgagaaccccgtacaggcgtcacctatgaaatagaattgagaaccccatgcaggtatcacctatgaaatacacagagaatattgatcacctatgaaatatgcagagagaattgagaaccccgtacaggcgtcacctacgaaatatacagagaatattgagaaccccgtacaggcgtcacctatgaaatagaattgagaaccccgtacaggcgtcacctatgaaatagaattgagaacccggtacaggcatcacctatgaaatacacagagaatattgatcacctatgaaataagcagagagaattgagaacttcatacgggcgtcacctaagaaatatacagagaatattgagaaccccgtacaggcgccacctatgaaatatacagagaatattgagaaccccgtacaggcgtcacctatgaaatacacagagaatattgatcacctatgaaataagaagagagaattgagaaccccgtacaggtatcacctacaaaacacgcagagaatattgagaacccagtacaggcgtcacctatgaaacacgcagagaatattgagaaccccgtgcaggcgtcacctatgaaacacgcagagaatattgagaaccccgtacaggcgtcacctatgaagtagagagaattgagaaccccgtgcaggtatcacctatgaaacacacagagaatattgagaaccccgtacaggcgtcacctaagaaatagagagaattgagaacccggtataggcatcacctgtgaaatatacagagaatattgagaaccccgtacaggcatcacctgtctcccacaagtggtgactctcaggctttcctgatgctcctctgcgcccactacagccccctgctctgccctgggatgattctaaagcaaatccagacatcgaatgatttctgaagatgagaggccctagctagacagacattctcaacacacaaagagcaactgcacccgagcaggaagggaggaccctgcgataatgccagggaacagaaaacttctttacaggtcagagaacagggccaccctcctgtcgcacggtcgggtccaacatgagacccttgctgtttagtcttcagagagtgggagagaagacccacgcgtacctgctcccaaagaagcagtcagtcaacgaagctgcgggctgaacgcatatgacaaaagttcacctggtaaaagctttaaaaagagactctcttccttcacttattcataattcacatctggtctcctttcaaagagctttaaagcaggttcagtggaaggcctatctaaggtggggtgacggggaggacaacaggtgacgtgcaggacaacaggtgacgtgcagtggccggtgaaggaatttggggctcatctagttcagcgtctccagtttccccactcgagacctggcaaccatggaccttgttgctgtctccatagtttgccttttcctgaatgtcctggagttggaaccttacaatatgtggccttttcagatgggtcacatgccttgaagattcccccatcttttcatggctcgatggctcatttctctttagtgctgaatagtattgtattattacattataatccataacactccattgtatagatgggccacagtttattcgcctactgaggaacatcttggttgcttccatgtattggcaattattcataaagctgccataagcaccctcatgcaggtttttgtgtggrtataagtctttaacttctactggttaagtaccaaggagtgtaatcactggatcacayagtaagagaatgtttggttttggaagcagccaccaaactgtcttccccagtggctgtggcattctgcattctgcgtgccaccagtggtgaatgagctgctgttgctccacatcctcgcctgcattgggtgttgtcaatgttctgggttccggcccttctgagaggtgtgtggtggtgtctcgttgtcattttcattcacatttccctgatgatggaggaagcagagcatcttcacatgcttgttttcatctgtgtatcttctgtggtgaggtgtctgtggtggtctctgggccatgttttaattaggctgtttgttttcttattgttgagtttgtaaagttcttgaatattttagatattggtcctttatcagatatcagatatcagatatgtcttttgtaatcattttctcccagtctgtggcttgtattttcattctcttgacagcgtcttttgcagagcattagtttttattttaatgaagtccagcttaccaattattttattcatggattttgcctttggtgttggattttaaaaagtcatcaccaaacccaaggtcatccagagtttctcctctcttacctttaaggagttttatggtttttcattttataatgaggtctgtgacccattctgagttagttgtgaaaggtgtaaggtctgcatctggaattgtttctgtacatgtggacatccagttgtccagcaccatttgttaagaggcgatcctttctccatagcatcacctttgctccttttcaaagctcggctgacctcatgtatgtggacccatgtctgggctctctgttctgtttcattgatctgtttgtctgtgtcatcaaccccaccctgcctggattcctgtggagttggagtgagtcgtaacaatgggtgtagtgcatcctaatgatgggtgctgttgtcctccgcctttgttcttcttcagtattgtgttggctgttatgggtcactcgcctctacatataaactttagaataaacttgcttgtatccaaaaaatgacttgctgggattttgactgggatttcattaaatccatagatcaagttggagaactgacatgctgacaatattgagtctttgggagccagtcataatcctgaaagacacaatcctgaatgccatagttctgaatgttaagatcctgaaatatcaaaatccctaaggtccctaaaatcctgaaaatcacagtctcaaaatatcaaaatcccaaaaatgtaattctggaaaaaattatttaaaagacatttatttacatttttaaaagggaatttatttgcaaaayatataaaatcgtgacaaaacacttcataggccattttacacaataaaataagcaataataacattcgtatttttgcagacataagccctcagatatcttgacgacagttgcatgggcatcacacttatgagcagatgaactgtgtttatgaagacataggtcaggaagggagatgtataaaagcatgtccctctgcttggtaattgtgtgcacccagctgtataactgcaggcatctgaaataccctgatgaacaacctaaggcttttgacaagatgagtcaaaaaccctgatgggtcactgctgcataaacagtcgaagagctgagatctcaagaaattgtatctttcgcaaatgcagatgtacaaaaaggacattcttcatttattgaggaagttgcagtgtttttgcattgagaaccagggaagctgatgatgtaactctcagtctgaagacccagggacggctggtgtgagtcctggagtccaaaggccgccaaacctggagctctgatgtccagggcagcagaaggaaagtctgccccagcactcagagggagcctaattcaccctctgtgtttgttttctctgggccccagctgtttggacagtgcccgcccaccaacactgaggcagaccttcccccagccctctcagactccaccccagtctccctggagacacctcccagaaacacccaaaatgaagctttactggatttctaggtattccttaacccagtcaagttgacacctaaaacgaagtctatggtttcaycccttgtcaacttggcactcacacacaactccttaagttatgcttaatttccaaataaagacaataacaagctaatagctccacccagcaggatgcaactctcctgtggttatgatttaggggattttaaacattagcaacactagacttttgggatttagactctatttagagattttgatattcagatatttggggattcactatttgggattatggcaattgggactgtatcttttgagattatgatccaaacccatgtcctgctagccatgagcatgtaatatttatacgctgcttctccatttctttacttttgctttctttcatcagtgctgtagttttttttcatatagatacggtacttgtgtaatgccatactttcagctcaagactctgatgacagcgaaagcgttttggaaatcactttaggagatgcatcagacaccgttttctaaatgaaccaatgacaaataatgtgtggggtgtccactgttgtaatccttgctcattgatcaaacaccagccacactgaacgggaaacaaaaccggtaaccaacctgttagaaccctttctttcatcatcttggttctgcgccctccagagcctggatgggaattacaagtccctaattcacatcatgaygactgacttttggttctgaatttcacattgcaacctcatcccaacatacctgatatttcttctattcaggtgtcttattatactatcgcttgtatggccaaggtaatcacgggtctccacccagccagcctctgtcctaagatggggcccgtggtgttcatgtgggaagtgcactcggaaactcatgtggaagctggaagaacttgtttctgctgccggccgtgcaactctccagccatgcaacgcttcgcgtggttattcccaagttcactcattcattcagaaagcacttgcraagtcccggccaatcacacgggctcctgattctyccragttcactcattcaytcagaaagcacttgcgaagtcccggccaatcacacgggctcctgattctcccgcgttcactcattcattcaggaagcacttgcgaagtcccggccaatcacacgggctcctgattctcccgagttcactcattcactcagraagcacttgcgaagtcccrgccaatcacacgggctcctgattctcccgtgttcactcattcactcagaaagcacttgcgaagtcccggccaatcacaagggctcctgattctcccgagttcactcattcactcagaaagcacatgcgaagtcccggccaatcacacgggctcctgattctcccgcgttcactcattgactcagaaagcacttgcgaagtcccggccaatcacacgggctcctgattctcccgcgttcactcattcactcagaaagcacatgcgaagtcccggccaatcacacgggctcctgattctcccgcgttcactcattcactcagaaagcacatgcgaagtcccggccaatcacacgggctcctgattctcccgagttcactcattcattcagaaagcacttgcgaagtcccggccaatcacacgggctcctgattctcccgagttcactcattcattcaggaagcccttgcgaagtcccggccaatcacacgggctcctgattcttccgagttcactcattcactcagaaagcacttgcgaagtcccggccaatcacacgggctcctgattctcccgcgttcactcattcattcaggaagcacttgcgaagtcccggccaatcacacgggctcctgattctcccgagttcactcattcattcaggaagcacttgcgaagtcccggccaatcacacgggctcctgattctcccgagttcactcattcattcaggaagcacttgcgaagtcccggccaatcacacgggctcctgattctcccgagttcactcattcattcaggaagcacttgcgaagtcccggccaatcacacgggctcctgattctcccgagttcactcattcattcaggaagcacttgcgaagtcccggccaatcacacgggctcctgattctcccgagttcactcattcactcagaaagcacttgcgaagtcctggccaatcacatgggctcccagttctctcccctcatccaaaataagcgtgttctggtcctcttctccttcgagccttccgtgaccctgaggtcctgcgttggctggtggggtgcccacttccttgtcgtgttggtggtgggaatcccagcctgaaaaccctcacagagaagggcgtgttccccgcagcccagtctcaggagggcactgaaccaaagctttgacttttcacggtgacagcagtagattataacacagaaaaaactgatgccaatgcttctgtcactttggagaaaatatgcccacacttttggggtcattttcacttgaaaggaagcacctgctgccttttcgtttttgaagaaattcattcatatttgaatgcatcccagtgctgctcagtgctctaaacccaagcatgcctcttggcttaaaaaaaaaaaattagaagagaattggccacctaatcactggcacacagaggccgcctctcacaggctgctccaggaggaagccactgataaattgttaatctcggatccatgcccctggctggagttcacgagcaccctctaaagcaggaggagaaggcacctatgttatcaaagtgcctttcatcctagcgaaacagtcccgggctcagtgtgcactgcctgaggcctttcttcctgtgtgtcagcacaccgtggagtcagcagcagcgcactctctcccaggggagcaggcgcaggagagggcacccggggtgctgggggggtcactctgtggcttatatagcgggaacagggttcctctcactgcaccttgaggacacacccacctgctcagcaaccctgacgtggatgcgcccagtgcggggtggcagcggccgtgtgtggctggcagcctcggacctgcgtgtggctggcagtcccggacctgcactgctcggctccacccagctcatgtcttctcccagggggaggaggctccccgacttctgtactagtgcagagtcactgctttcagatttgggagaagtaagagtcataaactgcccccatgtgagaaatctcttccccggtgtttggctgatgtccttacagactctgcttaaacacctctgaggtcactgctttcctgccaggtccatgctgctgtaagccagctgcatttgctggaaagatttttactttgagaattgggttgaaatttgcctctgtctgactaggaattggyagggcacctaaaggcacctcactgycactgcccaacccctgaggttttcctcccaccaccttctgccatggctccaagggggaggccttccagagccacatggaacaggggtgctctctgctgtgttagcacaatggggrggccttccagagccacatggaacaggcgtgctgtccgctgtgtaagcacaatggggaggccttccagagctacatggaacgggggtgctgtccgctgtgtaagcacaatgggtaggcctttcagagccacatggaacaggggtgctctccactgtgttagcacaatggggaggccttccagagccacatggtacaggggtgctgtccrctgtgttagcacaatggggaggccttccagagccacatggaacaggggtgctctccgctgtataagcatcctctgcatatgatgtcatccttcctgtcacttttccaaatctccccagttccaacctgaacgctggtggttaatggagaccgctgattacatggtgatgcttccgctctgagggcacagggcaggtgtagggaaggcactgggggagcctttccccttcccacgggtgagtgcgtcacaggctggaactgggggctcgaagccccagggcgttctatgcagcagttggtttgctttgggtctgatcatgccgagcgtctgactgcagctrtgtgttcacctgccctctccaccggcatttctagaacttttcgaggtaactgttcccattacgagggcgtttctgcagatgtcggcttagctcatttagcgaatgtgggcagctccgaagtcccaaccctcygacatctgtaaaacattttctcttctggtcttacctgccacccagtccayggtgagctgcgttacctgtcgtccgtcagttcacgttctgagtgtgcaaactcacactaacatgaacctaaaggaagcagtctttagaaagccatttgactgccaatccccacaccccactgaagtcatgtcattaatgccagagctaattggatatatttttttcttctttgcctcagtattgcattcaatagagaaagtgtcagactgggtgaatgctgagccctgtgagtgcaaaatattgcggcatgacagtgcaggagaagcttcatcccaggctgcagcatgggcacttttcattagtcagggagagatgcacactactcagctgtgattccttaccccctcatattggaagcagaatatattttactacacttgtgttgtttccagtgaaaatagacaacatgctggcatatgattatgtcagtttctccctgtggaagcccaaatgaggagagaatgcgataatgagctcctactgaatttacctgaatcctctgcaaatacccaagttttggaccccagcaattaaatgggctgtatgtcctctaaaccaaaggagcacagtccattccccatgatggtgggtgatggtgatgatggtggtgatgatgatggtgttgatgatggtaatgatagtgttgatggtgatgatgatggtgatggtgatgatggtggttataggccccactgttatggaccagcatgcagctacacctggcgtggcctccctggggagctggtgcatgggagtcatatgaggaacgtctgccgcttgtggaccaatgctgcatcagcaaggcacccctccccctcccccggggccaacctgcctgtgtccacctcagcggagctgattccatcagctgcagtgaaactcaggcccaagtccttcttagtggctgctgaagatgaagttcccacactatgaagtccgattctgaattccaccttgccagcctcttactggcatgtccttggcacactggaccccacatccaggctgcnnnnnnnnnnnnnnnnnnnnnnnnnnnnnnnnnnnnnnnnnnnnnnnnnnnnnnnnnnnnnnnnnnnnnnnnnnnnnnnnnnnnnnnnnnnnnnnnnnnnnnnnnnnnnnnnnnnnnnnnnnnnnnnnnnnnnnnnnnnnnnnnnnnnnnnnnnnnnnnnnnnnnnnnnnnnnnnnnnnnnnnnnnnnnnnnnnnnnnnnnnnnnnnnnnnnnnnnnnnnnnnnnnnnnnnnnnnnnnnnnnnnnnnnnnnnnnnnnnnnnnnnnnnnnnnnnnnnnnnnnnnnnnnnnnnnnnnnnnnnnnnnnnnnnnnnnnnnnnnnnnnnnnnnnnnnnnnnnnnnnnnnnnnnnnnnnnnnnnnnnnnnnnnnnnnnnnnnnnnnnnnnnnnnnnnnnnnnnnnnnnnnnnnnnnnnnnnnnnnnnnnnnnnnnnnnnnnnnnnnnnnnnnnnnnnnnnnnnnnnnnnnnnnnnnnnnnnnnnnnnnnnnnnnnnnnnnnnnnnnnnnnnnnnnnnnnnnnnnnnnnnnnnnnnnnnnnnnnnnnnnnnnnnnnnnnnnnnnnnnnnnnnnnnnnnnnnnnnnnnnnnnnnnnnnnnnnnnnnnnnnnnnnnnnnnnnnnnnnnnnnnnnnnnnnnnnnnnnnnnnnnnnnnnnnnnnnnnnnnnnnnnnnnnnnnnnnnnnnnnnnnnnnnnnnnnnnnnnnnnnnnnnnnnnnnnnnnnnnnnnnnnnnnnnnnnnnnnnnnnnnnnnnnnnnnnnnnnnnnnnnnnnnnnnnnnnnnnnnnnnnnnnnnnnnnnnnnnnnnnnnnnnnnnnnnnnnnnnnnnnnnnnnnnnnnnnnnnnnnnnnnnnnnnnnnnnnnnnnnnnnnnnnnnnnnnnnnnnnnnnnnnnnnnnnnnnnnnnnnnnnnnnnnnnnnnnnnnnnnnnnnnnnnnnnnnnnnnnnnnnnnnnnnnnnnnnnnnnnnnnnnnnnnnnnnnnnnnnnnnnnnnnnnnnnnnnnnnnnnnnnnnnnnnnnnnnnnnnnnnnnnnnnnnnnnnnnnnnnnnnnnnnnnnnnnnnnnnnnnnnnnnnnnnnnnnnnnnnnnnnnnnnnnnnnnnnnnnnnnnnnnnnnnnnnnnnnnnnnnnnnnnnnnnnnnnnnnnnnnnnnnnnnnnnnnnnnnnnnnnnnnnnnnnnnnnnnnnnnnnnnnnnnnnnnnnnnnnnnnnnnnnnnnnnnnnnnnnnnnnnnnnnnnnnnnnnnnnnnnnnnnnnnnnnnnnnnnnnnnnnnnnnnnnnnnnnnnnnnnnnnnnnnnnnnnnnnnnnnnnnnnnnnnnnnnnnnnnnnnnnnnnnnnnnnnnnnnnnnnnnnnnnnnnnnnnnnnnnnnnnnnnnnnnnnnnnnnnnnnnnnnnnnnnnnnnnnnnnnnnnnnnnnnnnnnnnnnnnnnnnnnnnnnnnnnnnnnnnnnnnnnnnnnnnnnnnnnnnnnnnnnnnnnnnnnnnnnnnnnnnnnnnnnnnnnnnnnnnnnnnnnnnnnnnnnnnnnnnnnnnnnnnnnnnnnnnnnnnnnnnnnnnnnnnnnnnnnnnnnnnnnnnnnnnnnnnnnnnnnnnnnnnnnnnnnnnnnnnnnnnnnnnnnnnnnnnnnnnnnnnnnnnnnnnnnnnnnnnnnnnnnnnnnnnnnnnnnnnnnnnnnnnnnnnnnnnnnnnnnnnnnnnnnnnnnnnnnnnnnnnnnnnnnnnnnnnnnnnnnnnnnnnnnnnnnnnnnnnnnnnnnnnnnnnnnnnnnnnnnnnnnnnnnnnnnnnnnnnnnnnnnnnnnnnnnnnnnnnnnnnnnnnnnnnnnnnnnnnnnnnnnnnnnnnnnnnnnnnnnnnnnnnnnnnnnnnnnnnnnnnnnnnnnnnnnnnnnnnnnnnnnnnnnnnnnnnnnnnnnnnnnnnnnnnnnnnnnnnnnnnnnnnnnnnnnnnnnnnnnnnnnnnnnnnnnnnnnnnnnnnnnnnnnnnnnnnnnnnnnnnnnnnnnnnnnnnnnnnnnnnnnnnnnnnnnnnnnnnnnnnnnnnnnnnnnnnnnnnnnnnnnnnnnnnnnnnnnnnnnnnnnnnnnnnnnnnnnnnnnnnnnnnnnnnnnnnnnnnnnnnnnnnnnnnnnnnnnnnnnnnnnnnnnnnnnnnnnnnnnnnnnnnnnnnnnnnnnnnnnnnnnnnnnnnnnnnnnnnnnnnnnnnnnnnnnnnnnnnnnnnnnnnnnnnnnnnnnnnnnnnnnnnnnnnnnnnnnnnnnnnnnnnnnnnnnnnnnnnnnnnnnnnnnnnnnnnnnnnnnnnnnnnnnnnnnnnnnnnnnnnnnnnnnnnnnnnnnnnnnnnnnnnnnnnnnnnnnnnnnnnnnnnnnnnnnnnnnnnnnnnnnnnnnnnnnnnnnnnnnnnnnnnnnnnnnnnnnnnnnnnnnnnnnnnnnnnnnnnnnnnnnnnnnnnnnnnnnnnnnnnnnnnnnnnnnnnnnnnnnnnnnnnnnnnnnnnnnnnnnnnnnnnnnnnnnnnnnnnnnnnnnnnnnnnnnnnnnnnnnnnnnnnnnnnnnnnnnnnnnnnnnnnnnnnnnnnnnnnnnnnnnnnnnnnnnnnnnnnnnnnnnnnnnnnnnnnnnnnnnnnnnnnnnnnnnnnnnnnnnnnnnnnnnnnnnnnnnnnnnnnnnnnnnnnnnnnnnnnnnnnnnnnnnnnnnnnnnnnnnnnnnnnnnnnnnnnnnnnnnnnnnnnnnnnnnnnnnnnnnnnnnnnnnnnnnnnnnnnnnnnnnnnnnnnnnnnnnnnnnnnnnnnnnnnnnnnnnnnnnnnnnnnnnnnnnnnnnnnnnnnnnnnnnnnnnnnnnnnnnnnnnnnnnnnnnnnnnnnnnnnnnnnnnnnnnnnnnnnnnnnnnnnnnnnnnnnnnnnnnnnnnnnnnnnnnnnnnnnnnnnnnnnnnnnnnnnnnnnnnnnnnnnnnnnnnnnnnnnnnnnnnnnnnnnnnnnnnnnnnnnnnnnnnnnnnnnnnnnnnnnnnnnnnnnnnnnnnnnnnnnnnnnnnnnnnnnnnnnnnnnnnnnnnnnnnnnnnnnnnnnnnnnnnnnnnnnnnnnnnnnnnnnnnnnnnnnnnnnnnnnnnnnnnnnnnnnnnnnnnnnnnnnnnnnnnnnnnnnnnnnnnnnnnnnnnnnnnnnnnnnnnnnnnnnnnnnnnnnnnnnnnnnnnnnnnnnnnnnnnnnnnnnnnnnnnnnnnnnnnnnnnnnnnnnnnnnnnnnnnnnnnnnnnnnnnnnnnnnnnnnnnnnnnnnnnnnnnnnnnnnnnnnnnnnnnnnnnnnnnnnnnnnnnnnnnnnnnnnnnnnnnnnnnnnnnnnnnnnnnnnnnnnnnnnnnnnnnnnnnnnnnnnnnnnnnnnnnnnnnnnnnnnnnnnnnnnnnnnnnnnnnnnnnnnnnnnnnnnnnnnnnnnnnnnnnnnnnnnnnnnnnnnnnnnnnnnnnnnnnnnnnnnnnnnnnnnnnnnnnnnnnnnnnnnnnnnnnnnnnnnnnnnnnnnnnnnnnnnnnnnnnnnnnnnnnnnnnnnnnnnnnnnnnnnnnnnnnnnnnnnnnnnnnnnnnnnnnnnnnnnnnnnnnnnnnnnnnnnnnnnnnnnnnnnnnnnnnnnnnnnnnnnnnnnnnnnnnnnnnnnnnnnnnnnnnnnnnnnnnnnnnnnnnnnnnnnnnnnnnnnnnnnnnnnnnnnnnnnnnnnnnnnnnnnnnnnnnnnnnnnnnnnnnnnnnnnnnnnnnnnnnnnnnnnnnnnnnnnnnnnnnnnnnnnnnnnnnnnnnnnnnnnnnnnnnnnnnnnnnnnnnnnnnnnnnnnnnnnnnnnnnnnnnnnnnnnnnnnnnnnnnnnnnnnnnnnnnnnnnnnnnnnnnnnnnnnnnnnnnnnnnnnnnnnnnnnnnnnnnnnnnnnnnnnnnnnnnnnnnnnnnnnnnnnnnnnnnnnnnnnnnnnnnnnnnnnnnnnnnnnnnnnnnnnnnnnnnnnnnnnnnnnnnnnnnnnnnnnnnnnnnnnnnnnnnnnnnnnnnnnnnnnnnnnnnnnnnnnnnnnnnnnnnnnnnnnnnnnnnnnnnnnnnnnnnnnnnnnnnnnnnnnnnnnnnnnnnnnnnnnnnnnnnnnnnnnnnnnnnnnnnnnnnnnnnnnnnnnnnnnnnnnnnnnnnnnnnnnnnnnnnnnnnnnnnnnnnnnnnnnnnnnnnnnnnnnnnnnnnnnnnnnnnnnnnnnnnnnnnnnnnnnnnnnnnnnnnnnnnnnnnnnnnnnnnnnnnnnnnnnnnnnnnnnnnnnnnnnnnnnnnnnnnnnnnnnnnnnnnnnnnnnnnnnnnnnnnnnnnnnnnnnnnnnnnnnnnnnnnnnnnnnnnnnnnnnnnnnnnnnnnnnnnnnnnnnnnnnnnnnnnnnnnnnnnnnnnnnnnnnnnnnnnnnnnnnnnnnnnnnnnnnnnnnnnnnnnnnnnnnnnnnnnnnnnnnnnnnnnnnnnnnnnnnnnnnnnnnnnnnnnnnnnnnnnnnnnnnnnnnnnnnnnnnnnnnnnnnnnnnnnnnnnnnnnnnnnnnnnnnnnnnnnnnnnnnnnnnnnnnnnnnnnnnnnnnnnnnnnnnnnnnnnnnnnnnnnnnnnnnnnnnnnnnnnnnnnnnnnnnnnnnnnnnnnnnnnnnnnnnnnnnnnnnnnnnnnnnnnnnnnnnnnnnnnnnnnnnnnnnnnnnnnnnnnnnnnnnnnnnnnnnnnnnnnnnnnnnnnnnnnnnnnnnnnnnnnnnnnnnnnnnnnnnnnnnnnnnnnnnnnnnnnnnnnnnnnnnnnnnnnnnnnnnnnnnnnnnnnnnnnnnnnnnnnnnnnnnnnnnnnnnnnnnnnnnnnnnnnnnnnnnnnnnnnnnnnnnnnnnnnnnnnnnnnnnnnnnnnnnnnnnnnnnnnnnnnnnnnnnnnnnnnnnnnnnnnnnnnnnnnnnnnnnnnnnnnnnnnnnnnnnnnnnnnnnnnnnnnnnnnnnnnnnnnnnnnnnnnnnnnnnnnnnnnnnnnnnnnnnnnnnnnnnnnnnnnnnnnnnnnnnnnnnnnnnnnnnnnnnnnnnnnnnnnnnnnnnnnnnnnnnnnnnnnnnnnnnnnnnnnnnnnnnnnnnnnnnnnnnnnnnnnnnnnnnnnnnnnnnnnnnnnnnnnnnnnnnnnnnnnnnnnnnnnnnnnnnnnnnnnnnnnnnnnnnnnnnnnnnnnnnnnnnnnnnnnnnnnnnnnnnnnnnnnnnnnnnnnnnnnnnnnnnnnnnnnnnnnnnnnnnnnnnnnnnnnnnnnnnnnnnnnnnnnnnnnnnnnnnnnnnnnnnnnnnnnnnnnnnnnnnnnnnnnnnnnnnnnnnnnnnnnnnnnnnnnnnnnnnnnnnnnnnnnnnnnnnnnnnnnnnnnnnnnnnnnnnnnnnnnnnnnnnnnnnnnnnnnnnnnnnnnnnnnnnnnnnnnnnnnnnnnnnnnnnnnnnnnnnnnnnnnnnnnnnnnnnnnnnnnnnnnnnnnnnnnnnnnnnnnnnnnnnnnnnnnnnnnnnnnnnnnnnnnnnnnnnnnnnnnnnnnnnnnnnnnnnnnnnnnnnnnnnnnnnnnnnnnnnnnnnnnnnnnnnnnnnnnnnnnnnnnnnnnnnnnnnnnnnnnnnnnnnnnnnnnnnnnnnnnnnnnnnnnnnnnnnnnnnnnnnnnnnnnnnnnnnnnnnnnnnnnnnnnnnnnnnnnnnnnnnnnnnnnnnnnnnnnnnnnnnnnnnnnnnnnnnnnnnnnnnnnnnnnnnnnnnnnnnnnnnnnnnnnnnnnnnnnnnnnnnnnnnnnnnnnnnnnnnnnnnnnnnnnnnnnnnnnnnnnnnnnnnnnnnnnnnnnnnnnnnnnnnnnnnnnnnnnnnnnnnnnnnnnnnnnnnnnnnnnnnnnnnnnnnnnnnnnnnnnnnnnnnnnnnnnnnnnnnnnnnnnnnnnnnnnnnnnnnnnnnnnnnnnnnnnnnnnnnnnnnnnnnnnnnnnnnnnnnnnnnnnnnnnnnnnnnnnnnnnnnnnnnnnnnnnnnnnnnnnnnnnnnnnnnnnnnnnnnnnnnnnnnnnnnnnnnnnnnnnnnnnnnnnnnnnnnnnnnnnnnnnnnnnnnnnnnnnnnnnnnnnnnnnnnnnnnnnnnnnnnnnnnnnnnnnnnnnnnnnnnnnnnnnnnnnnnnnnnnnnnnnnnnnnnnnnnnnnnnnnnnnnnnnnnnnnnnnnnnnnnnnnnnnnnnnnnnnnnnnnnnnnnnnnnnnnnnnnnnnnnnnnnnnnnnnnnnnnnnnnnnnnnnnnnnnnnnnnnnnnnnnnnnnnnnnnnnnnnnnnnnnnnnnnnnnnnnnnnnnnnnnnnnnnnnnnnnnnnnnnnnnnnnnnnnnnnnnnnnnnnnnnnnnnnnnnnnnnnnnnnnnnnnnnnnnnnnnnnnnnnnnnnnnnnnnnnnnnnnnnnnnnnnnnnnnnnnnnnnnnnnnnnnnnnnnnnnnnnnnnnnnnnnnnnnnnnnnnnnnnnnnnnnnnnnnnnnnnnnnnnnnnnnnnnnnnnnnnnnnnnnnnnnnnnnnnnnnnnnnnnnnnnnnnnnnnnnnnnnnnnnnnnnnnnnnnnnnnnnnnnnnnnnnnnnnnnnnnnnnnnnnnnnnnnnnnnnnnnnnnnnnnnnnnnnnnnnnnnnnnnnnnnnnnnnnnnnnnnnnnnnnnnnnnnnnnnnnnnnnnnnnnnnnnnnnnnnnnnnnnnnnnnnnnnnnnnnnnnnnnnnnnnnnnnnnnnnnnnnnnnnnnnnnnnnnnnnnnnnnnnnnnnnnnnnnnnnnnnnnnnnnnnnnnnnnnnnnnnnnnnnnnnnnnnnnnnnnnnnnnnnnnnnnnnnnnnnnnnnnnnnnnnnnnnnnnnnnnnnnnnnnnnnnnnnnnnnnnnnnnnnnnnnnnnnnnnnnnnnnnnnnnnnnnnnnnnnnnnnnnnnnnnnnnnnnnnnnnnnnnnnnnnnnnnnnnnnnnnnnnnnnnnnnnnnnnnnnnnnnnnnnnnnnnnnnnnnnnnnnnnnnnnnnnnnnnnnnnnnnnnnnnnnnnnnnnnnnnnnnnnnnnnnnnnnnnnnnnnnnnnnnnnnnnnnnnnnnnnnnnnnnnnnnnnnnnnnnnnnnnnnnnnnnnnnnnnnnnnnnnnnnnnnnnnnnnnnnnnnnnnnnnnnnnnnnnnnnnnnnnnnnnnnnnnnnnnnnnnnnnnnnnnnnnnnnnnnnnnnnnnnnnnnnnnnnnnnnnnnnnnnnnnnnnnnnnnnnnnnnnnnnnnnnnnnnnnnnnnnnnnnnnnnnnnnnnnnnnnnnnnnnnnnnnnnnnnnnnnnnnnnnnnnnnnnnnnnnnnnnnnnnnnnnnnnnnnnnnnnnnnnnnnnnnnnnnnnnnnnnnnnnnnnnnnnnnnnnnnnnnnnnnnnnnnnnnnnnnnnnnnnnnnnnnnnnnnnnnnnnnnnnnnnnnnnnnnnnnnnnnnnnnnnnnnnnnnnnnnnnnnnnnnnnnnnnnnnnnnnnnnnnnnnnnnnnnnnnnnnnnnnnnnnnnnnnnnnnnnnnnnnnnnnnnnnnnnnnnnnnnnnnnnnnnnnnnnnnnnnnnnnnnnnnnnnnnnnnnnnnnnnnnnnnnnnnnnnnnnnnnnnnnnnnnnnnnnnnnnnnnnnnnnnnnnnnnnnnnnnnnnnnnnnnnnnnnnnnnnnnnnnnnnnnnnnnnnnnnnnnnnnnnnnnnnnnnnnnnnnnnnnnnnnnnnnnnnnnnnnnnnnnnnnnnnnnnnnnnnnnnnnnnnnnnnnnnnnnnnnnnnnnnnnnnnnnnnnnnnnnnnnnnnnnnnnnnnnnnnnnnnnnnnnnnnnnnnnnnnnnnnnnnnnnnnnnnnnnnnnnnnnnnnnnnnnnnnnnnnnnnnnnnnnnnnnnnnnnnnnnnnnnnnnnnnnnnnnnnnnnnnnnnnnnnnnnnnnnnnnnnnnnnnnnnnnnnnnnnnnnnnnnnnnnnnnnnnnnnnnnnnnnnnnnnnnnnnnnnnnnnnnnnnnnnnnnnnnnnnnnnnnnnnnnnnnnnnnnnnnnnnnnnnnnnnnnnnnnnnnnnnnnnnnnnnnnnnnnnnnnnnnnnnnnnnnnnnnnnnnnnnnnnnnnnnnnnnnnnnnnnnnnnnnnnnnnnnnnnnnnnnnnnnnnnnnnnnnnnnnnnnnnnnnnnnnnnnnnnnnnnnnnnnnnnnnnnnnnnnnnnnnnnnnnnnnnnnnnnnnnnnnnnnnnnnnnnnnnnnnnnnnnnnnnnnnnnnnnnnnnnnnnnnnnnnnnnnnnnnnnnnnnnnnnnnnnnnnnnnnnnnnnnnnnnnnnnnnnnnnnnnnnnnnnnnnnnnnnnnnnnnnnnnnnnnnnnnnnnnnnnnnnnnnnnnnnnnnnnnnnnnnnnnnnnnnnnnnnnnnnnnnnnnnnnnnnnnnnnnnnnnnnnnnnnnnnnnnnnnnnnnnnnnnnnnnnnnnnnnnnnnnnnnnnnnnnnnnnnnnnnnnnnnnnnnnnnnnnnnnnnnnnnnnnnnnnnnnnnnnnnnnnnnnnnnnnnnnnnnnnnnnnnnnnnnnnnnnnnnnnnnnnnnnnnnnnnnnnnnnnnnnnnnnnnnnnnnnnnnnnnnnnnnnnnnnnnnnnnnnnnnnnnnnnnnnnnnnnnnnnnnnnnnnnnnnnnnnnnnnnnnnnnnnnnnnnnnnnnnnnnnnnnnnnnnnnnnnnnnnnnnnnnnnnnnnnnnnnnnnnnnnnnnnnnnnnnnnnnnnnnnnnnnnnnnnnnnnnnnnnnnnnnnnnnnnnnnnnnnnnnnnnnnnnnnnnnnnnnnnnnnnnnnnnnnnnnnnnnnnnnnnnnnnnnnnnnnnnnnnnnnnnnnnnnnnnnnnnnnnnnnnnnnnnnnnnnnnnnnnnnnnnnnnnnnnnnnnnnnnnnnnnnnnnnnnnnnnnnnnnnnnnnnnnnnnnnnnnnnnnnnnnnnnnnnnnnnnnnnnnnnnnnnnnnnnnnnnnnnnnnnnnnnnnnnnnnnnnnnnnnnnnnnnnnnnnnnnnnnnnnnnnnnnnnnnnnnnnnnnnnnnnnnnnnnnnnnnnnnnnnnnnnnnnnnnnnnnnnnnnnnnnnnnnnnnnnnnnnnnnnnnnnnnnnnnnnnnnnnnnnnnnnnnnnnnnnnnnnnnnnnnnnnnnnnnnnnnnnnnnnnnnnnnnnnnnnnnnnnnnnnnnnnnnnnnnnnnnnnnnnnnnnnnnnnnnnnnnnnnnnnnnnnnnnnnnnnnnnnnnnnnnnnnnnnnnnnnnnnnnnnnnnnnnnnnnnnnnnnnnnnnnnnnnnnnnnnnnnnnnnnnnnnnnnnnnnnnnnnnnnnnnnnnnnnnnnnnnnnnnnnnnnnnnnnnnnnnnnnnnnnnnnnnnnnnnnnnnnnnnnnnnnnnnnnnnnnnnnnnnnnnnnnnnnnnnnnnnnnnnnnnnnnnnnnnnnnnnnnnnnnnnnnnnnnnnnnnnnnnnnnnnnnnnnnnnnnnnnnnnnnnnnnnnnnnnnnnnnnnnnnnnnnnnnnnnnnnnnnnnnnnnnnnnnnnnnnnnnnnnnnnnnnnnnnnnnnnnnnnnnnnnnnnnnnnnnnnnnnnnnnnnnnnnnnnnnnnnnnnnnnnnnnnnnnnnnnnnnnnnnnnnnnnnnnnnnnnnnnnnnnnnnnnnnnnnnnnnnnnnnnnnnnnnnnnnnnnnnnnnnnnnnnnnnnnnnnnnnnnnnnnnnnnnnnnnnnnnnnnnnnnnnnnnnnnnnnnnnnnnnnnnnnnnnnnnnnnnnnnnnnnnnnnnnnnnnnnnnnnnnnnnnnnnnnnnnnnnnnnnnnnnnnnnnnnnnnnnnnnnnnnnnnnnnnnnnnnnnnnnnnnnnnnnnnnnnnnnnnnnnnnnnnnnnnnnnnnnnnnnnnnnnnnnnnnnnnnnnnnnnnnnnnnnnnnnnnnnnnnnnnnnnnnnnnnnnnnnnnnnnnnnnnnnnnnnnnnnnnnnnnnnnnnnnnnnnnnnnnnnnnnnnnnnnnnnnnnnnnnnnnnnnnnnnnnnnnnnnnnnnnnnnnnnnnnnnnnnnnnnnnnnnnnnnnnnnnnnnnnnnnnnnnnnnnnnnnnnnnnnnnnnnnnnnnnnnnnnnnnnnnnnnnnnnnnnnnnnnnnnnnnnnnnnnnnnnnnnnnnnnnnnnnnnnnnnnnnnnnnnnnnnnnnnnnnnnnnnnnnnnnnnnnnnnnnnnnnnnnnnnnnnnnnnnnnnnnnnnnnnnnnnnnnnnnnnnnnnnnnnnnnnnnnnnnnnnnnnnnnnnnnnnnnnnnnnnnnnnnnnnnnnnnnnnnnnnnnnnnnnnnnnnnnnnnnnnnnnnnnnnnnnnnnnnnnnnnnnnnnnnnnnnnnnnnnnnnnnnnnnnnnnnnnnnnnnnnnnnnnnnnnnnnnnnnnnnnnnnnnnnnnnnnnnnnnnnnnnnnnnnnnnnnnnnnnnnnnnnnnnnnnnnnnnnnnnnnnnnnnnnnnnnnnnnnnnnnnnnnnnnnnnnnnnnnnnnnnnnnnnnnnnnnnnnnnnnnnnnnnnnnnnnnnnnnnnnnnnnnnnnnnnnnnnnnnnnnnnnnnnnnnnnnnnnnnnnnnnnnnnnnnnnnnnnnnnnnnnnnnnnnnnnnnnnnnnnnnnnnnnnnnnnnnnnnnnnnnnnnnnnnnnnnnnnnnnnnnnnnnnnnnnnnnnnnnnnnnnnnnnnnnnnnnnnnnnnnnnnnnnnnnnnnnnnnnnnnnnnnnnnnnnnnnnnnnnnnnnnnnnnnnnnnnnnnnnnnnnnnnnnnnnnnnnnnnnnnnnnnnnnnnnnnnnnnnnnnnnnnnnnnnnnnnnnnnnnnnnnnnnnnnnnnnnnnnnnnnnnnnnnnnnnnnnnnnnnnnnnnnnnnnnnnnnnnnnnnnnnnnnnnnnnnnnnnnnnnnnnnnnnnnnnnnnnnnnnnnnnnnnnnnnnnnnnnnnnnnnnnnnnnnnnnnnnnnnnnnnnnnnnnnnnnnnnnnnnnnnnnnnnnnnnnnnnnnnnnnnnnnnnnnnnnnnnnnnnnnnnnnnnnnnnnnnnnnnnnnnnnnnnnnnnnnnnnnnnnnnnnnnnnnnnnnnnnnnnnnnnnnnnnnnnnnnnnnnnnnnnnnnnnnnnnnnnnnnnnnnnnnnnnnnnnnnnnnnnnnnnnnnnnnnnnnnnnnnnnnnnnnnnnnnnnnnnnnnnnnnnnnnnnnnnnnnnnnnnnnnnnnnnnnnnnnnnnnnnnnnnnnnnnnnnnnnnnnnnnnnnnnnnnnnnnnnnnnnnnnnnnnnnnnnnnnnnnnnnnnnnnnnnnnnnnnnnnnnnnnnnnnnnnnnnnnnnnnnnnnnnnnnnnnnnnnnnnnnnnnnnnnnnnnnnnnnnnnnnnnnnnnnnnnnnnnnnnnnnnnnnnnnnnnnnnnnnnnnnnnnnnnnnnnnnnnnnnnnnnnnnnnnnnnnnnnnnnnnnnnnnnnnnnnnnnnnnnnnnnnnnnnnnnnnnnnnnnnnnnnnnnnnnnnnnnnnnnnnnnnnnnnnnnnnnnnnnnnnnnnnnnnnnnnnnnnnnnnnnnnnnnnnnnnnnnnnnnnnnnnnnnnnnnnnnnnnnnnnnnnnnnnnnnnnnnnnnnnnnnnnnnnnnnnnnnnnnnnnnnnnnnnnnnnnnnnnnnnnnnnnnnnnnnnnnnnnnnnnnnnnnnnnnnnnnnnnnnnnnnnnnnnnnnnnnnnnnnnnnnnnnnnnnnnnnnnnnnnnnnnnnnnnnnnnnnnnnnnnnnnnnnnnnnnnnnnnnnnnnnnnnnnnnnnnnnnnnnnnnnnnnnnnnnnnnnnnnnnnnnnnnnnnnnnnnnnnnnnnnnnnnnnnnnnnnnnnnnnnnnnnnnnnnnnnnnnnnnnnnnnnnnnnnnnnnnnnnnnnnnnnnnnnnnnnnnnnnnnnnnnnnnnnnnnnnnnnnnnnnnnnnnnnnnnnnnnnnnnnnnnnnnnnnnnnnnnnnnnnnnnnnnnnnnnnnnnnnnnnnnnnnnnnnnnnnnnnnnnnnnnnnnnnnnnnnnnnnnnnnnnnnnnnnnnnnnnnnnnnnnnnnnnnnnnnnnnnnnnnnnnnnnnnnnnnnnnnnnnnnnnnnnnnnnnnnnnnnnnnnnnnnnnnnnnnnnnnnnnnnnnnnnnnnnnnnnnnnnnnnnnnnnnnnnnnnnnnnnnnnnnnnnnnnnnnnnnnnnnnnnnnnnnnnnnnnnnnnnnnnnnnnnnnnnnnnnnnnnnnnnnnnnnnnnnnnnnnnnnnnnnnnnnnnnnnnnnnnnnnnnnnnnnnnnnnnnnnnnnnnnnnnnnnnnnnnnnnnnnnnnnnnnnnnnnnnnnnnnnnnnnnnnnnnnnnnnnnnnnnnnnnnnnnnnnnnnnnnnnnnnnnnnnnnnnnnnnnnnnnnnnnnnnnnnnnnnnnnnnnnnnnnnnnnnnnnnnnnnnnnnnnnnnnnnnnnnnnnnnnnnnnnnnnnnnnnnnnnnnnnnnnnnnnnnnnnnnnnnnnnnnnnnnnnnnnnnnnnnnnnnnnnnnnnnnnnnnnnnnnnnnnnnnnnnnnnnnnnnnnnnnnnnnnnnnnnnnnnnnnnnnnnnnnnnnnnnnnnnnnnnnnnnnnnnnnnnnnnnnnnnnnnnnnnnnnnnnnnnnnnnnnnnnnnnnnnnnnnnnnnnnnnnnnnnnnnnnnnnnnnnnnnnnnnnnnnnnnnnnnnnnnnnnnnnnnnnnnnnnnnnnnnnnnnnnnnnnnnnnnnnnnnnnnnnnnnnnnnnnnnnnnnnnnnnnnnnnnnnnnnnnnnnnnnnnnnnnnnnnnnnnnnnnnnnnnnnnnnnnnnnnnnnnnnnnnnnnnnnnnnnnnnnnnnnnnnnnnnnnnnnnnnnnnnnnnnnnnnnnnnnnnnnnnnnnnnnnnnnnnnnnnnnnnnnnnnnnnnnnnnnnnnnnnnnnnnnnnnnnnnnnnnnnnnnnnnnnnnnnnnnnnnnnnnnnnnnnnnnnnnnnnnnnnnnnnnnnnnnnnnnnnnnnnnnnnnnnnnnnnnnnnnnnnnnnnnnnnnnnnnnnnnnnnnnnnnnnnnnnnnnnnnnnnnnnnnnnnnnnnnnnnnnnnnnnnnnnnnnnnnnnnnnnnnnnnnnnnnnnnnnnnnnnnnnnnnnnnnnnnnnnnnnnnnnnnnnnnnnnnnnnnnnnnnnnnnnnnnnnnnnnnnnnnnnnnnnnnnnnnnnnnnnnnnnnnnnnnnnnnnnnnnnnnnnnnnnnnnnnnnnnnnnnnnnnnnnnnnnnnnnnnnnnnnnnnnnnnnnnnnnnnnnnnnnnnnnnnnnnnnnnnnnnnnnnnnnnnnnnnnnnnnnnnnnnnnnnnnnnnnnnnnnnnnnnnnnnnnnnnnnnnnnnnnnnnnnnnnnnnnnnnnnnnnnnnnnnnnnnnnnnnnnnnnnnnnnnnnnnnnnnnnnnnnnnnnnnnnnnnnnnnnnnnnnnnnnnnnnnnnnnnnnnnnnnnnnnnnnnnnnnnnnnnnnnnnnnnnnnnnnnnnnnnnnnnnnnnnnnnnnnnnnnnnnnnnnnnnnnnnnnnnnnnnnnnnnnnnnnnnnnnnnnnnnnnnnnnnnnnnnnnnnnnnnnnnnnnnnnnnnnnnnnnnnnnnnnnnnnnnnnnnnnnnnnnnnnnnnnnnnnnnnnnnnnnnnnnnnnnnnnnnnnnnnnnnnnnnnnnnnnnnnnnnnnnnnnnnnnnnnnnnnnnnnnnnnnnnnnnnnnnnnnnnnnnnnnnnnnnnnnnnnnnnnnnnnnnnnnnnnnnnnnnnnnnnnnnnnnnnnnnnnnnnnnnnnnnnnnnnnnnnnnnnnnnnnnnnnnnnnnnnnnnnnnnnnnnnnnnnnnnnnnnnnnnnnnnnnnnnnnnnnnnnnnnnnnnnnnnnnnnnnnnnnnnnnnnnnnnnnnnnnnnnnnnnnnnnnnnnnnnnnnnnnnnnnnnnnnnnnnnnnnnnnnnnnnnnnnnnnnnnnnnnnnnnnnnnnnnnnnnnnnnnnnnnnnnnnnnnnnnnnnnnnnnnnnnnnnnnnnnnnnnnnnnnnnnnnnnnnnnnnnnnnnnnnnnnnnnnnnnnnnnnnnnnnnnnnnnnnnnnnnnnnnnnnnnnnnnnnnnnnnnnnnnnnnnnnnnnnnnnnnnnnnnnnnnnnnnnnnnnnnnnnnnnnnnnnnnnnnnnnnnnnnnnnnnnnnnnnnnnnnnnnnnnnnnnnnnnnnnnnnnnnnnnnnnnnnnnnnnnnnnnnnnnnnnnnnnnnnnnnnnnnnnnnnnnnnnnnnnnnnnnnnnnnnnnnnnnnnnnnnnnnnnnnnnnnnnnnnnnnnnnnnnnnnnnnnnnnnnnnnnnnnnnnnnnnnnnnnnnnnnnnnnnnnnnnnnnnnnnnnnnnnnnnnnnnnnnnnnnnnnnnnnnnnnnnnnnnnnnnnnnnnnnnnnnnnnnnnnnnnnnnnnnnnnnnnnnnnnnnnnnnnnnnnnnnnnnnnnnnnnnnnnnnnnnnnnnnnnnnnnnnnnnnnnnnnnnnnnnnnnnnnnnnnnnnnnnnnnnnnnnnnnnnnnnnnnnnnnnnnnnnnnnnnnnnnnnnnnnnnnnnnnnnnnnnnnnnnnnnnnnnnnnnnnnnnnnnnnnnnnnnnnnnnnnnnnnnnnnnnnnnnnnnnnnnnnnnnnnnnnnnnnnnnnnnnnnnnnnnnnnnnnnnnnnnnnnnnnnnnnnnnnnnnnnnnnnnnnnnnnnnnnnnnnnnnnnnnnnnnnnnnnnnnnnnnnnnnnnnnnnnnnnnnnnnnnnnnnnnnnnnnnnnnnnnnnnnnnnnnnnnnnnnnnnnnnnnnnnnnnnnnnnnnnnnnnnnnnnnnnnnnnnnnnnnnnnnnnnnnnnnnnnnnnnnnnnnnnnnnnnnnnnnnnnnnnnnnnnnnnnnnnnnnnnnnnnnnnnnnnnnnnnnnnnnnnnnnnnnnnnnnnnnnnnnnnnnnnnnnnnnnnnnnnnnnnnnnnnnnnnnnnnnnnnnnnnnnnnnnnnnnnnnnnnnnnnnnnnnnnnnnnnnnnnnnnnnnnnnnnnnnnnnnnnnnnnnnnnnnnnnnnnnnnnnnnnnnnnnnnnnnnnnnnnnnnnnnnnnnnnnnnnnnnnnnnnnnnnnnnnnnnnnnnnnnnnnnnnnnnnnnnnnnnnnnnnnnnnnnnnnnnnnnnnnnnnnnnnnnnnnnnnnnnnnnnnnnnnnnnnnnnnnnnnnnnnnnnnnnnnnnnnnnnnnnnnnnnnnnnnnnnnnnnnnnnnnnnnnnnnnnnnnnnnnnnnnnnnnnnnnnnnnnnnnnnnnnnnnnnnnnnnnnnnnnnnnnnnnnnnnnnnnnnnnnnnnnnnnnnnnnnnnnnnnnnnnnnnnnnnnnnnnnnnnnnnnnnnnnnnnnnnnnnnnnnnnnnnnnnnnnnnnnnnnnnnnnnnnnnnnnnnnnnnnnnnnnnnnnnnnnnnnnnnnnnnnnnnnnnnnnnnnnnnnnnnnnnnnnnnnnnnnnnnnnnnnnnnnnnnnnnnnnnnnnnnnnnnnnnnnnnnnnnnnnnnnnnnnnnnnnnnnnnnnnnnnnnnnnnnnnnnnnnntcattgagggggaaagacacgtggcgtgaggatggggtgtcattgagggggaaagacgtgtggcgtgagatggggtgtcagtgagggggaaagacgtgtggcgtgagatggggtgtcagtgagggggaaagacacgtggcgtgagatggggtgtcattgagggggaaagacacgtggcgtgagatggggtgtcattgagggggaaagacacgtggcgtgagatggggtgtcattgagggggaaagacacgtggcgtgagatggggtgtcagtgagggggaaagacacgtggcgtgagatggggtgtcattgagggggaaagacatgtggcgtgagatggggtgtcattgagggggaaagacacgtggcgtgagatggggtgtcattgagggggaaagacacgtggcgtgagatggggtgtcattgagggggaaagacacgtggcgtgagatggggtgtcattgagggggaaagacacgtggcgtgagatggggtgtcattgagggggaaagacacgtggcgtgagatggggtgtcattgagggggaaagacacgtggcgtgagatggggtgtcattcagtctcttcacaggatcttaatggtgtattttccctgtaaactgtttgcttgttctatccattggtcaagtctctctggcctccaaaacattttagtgtgtctgtgctggtgtgagaacaatgttgtagccctcaagaaaatgaagcttttaattttctattgtttcttttttctttctttttttttttttttgaggcagagtctcgctctgtcgcccaggctggagtgcagtggcgcgatctcagctcactactagctccgcctcctgggttcacaccattcttctgcctcaggctcctgagtagctgggactacaggcgcccgccaccacgcctggctaattttttgtatttttagtagagatggggtttcaccatgttagtcaggatggtcttgatctcctgacctcgtgatccgcatgcctcagcgtcccaaagtgctgggattacaggtgtgagccaccaagcccagcctattatttcttagaataatgtttgttcccaggctttgatcacaatagatgcccaatacaggttggtgcaatcaatgggtaggttagtgggtggagggatggacggagactgggctttgactttaatgagaggttcatatttttttaaatataggttaacattttggttaatattttggcagaaaatagtttcaaaatgcataatcttgaattagatcttgagcaagttggaaggtgcctgtcagcttgtgtgactgagcatctaaggggctctctgactgtgttcctcacttctcacctgaggatcacaatgagctgtggcgagagcttctcatggagaaccaagtatttgttttcagaatggatgggaaagggggaaaagagtggaaaactaaaatgatttctcatcctctccttgtttcatgataatagttataatttattaagcacttacagtatgctgggcccatgcctcacttgtcaccattttacagatatggaaactgaggcatgaagaaatgagcgagcttgccccaaaccacagaccatgagcgctggggccaagactccgggagcatggtcagcctttcttcatgggagtccagcctggcatcccccagggcagggcagcacaaggatggatgatcggattgatgggaactttaaatgtgtctaaggtcctagctgcaatgatggaaaaagaaatgtgagctaacaccctacagattctagaataatcaggcctgagaaagtgtgcaggcagctgcagccacggcaggggagcccctgttggttcagtactggcagctccacgccaagcctggccgcgtctggccagggtgctctggctttcccgccgtgcctgatggcctttctgctcacgttgccatttcttcctcccttcctggtccaccatggagcctcagtttctcaagggtggatgcctgccagttccccaaactctacattcccagctgctctctgtcgatacaagtaggctgttcatatggttgagtgtggcgctcactgtaccacgctgtaccgggcactgccgccccttctcacgatgatgtgagggaagtcttgccaagccgtggtattctggaaccttctcaccgtgatgtgagggaaaccttgccaagctgtggtattctggaaccttctcgcgatgatgtgagggaagtcttgccaagccgtggtattctggaaccttctcaccgtgatgtgagggaaaccttgccgagctgtggtattctggaaccttctcacgatgatgtgagggaagtcttgccgagccgtggtattctggaaccttctcgcgatgatgtgagggaaaccttgccgagccgtggtattctggaaccttctcgcgatgatgtgagggaaaccttgccgagccgtggtattctggaaccttctcgcgatgatgtgagggaagtcttgccgagccgtggtattctggaaccttcttgcgatgatgtgagggaagtcttgccgagccgtggcattctggagacgtggcttgctgttcagttcctccttcagagcaggcacttggcctctgtgtgggtttgagaggggaataagcatcattttgcaaagttcagggtgggtcgacacacctgtctttgtgttaagcaggactcatcagtgttgacagtgacggtgtttgctgttagaaacacagaccgcagcctcttccctcggggtggtgggagaagcgccagcctgccctggagggagagggtgagcgctccaccccgggatgcctgctgatgtcccccttctccttccccttccccttccccttctctcgctctatcgcccaggctggagtgcagtggcacaatcttagctcactgcaacctccacccccaaggttcaagcaattctcctggtttagtctcctgcatagctgggattacaggcgcctgacaccatgcccagctaatttttggtatttttagtagagatggagtttcactatattgctcaggctggtctccaactcctaggctcaagaaatccgcccaccttggcctcccaaagtgctgggattacgggtgtgagccaccgcgtccggctgatgtctgctttctctttcttttggcattttcctgctggcaacactgtagccactctgaattgaataccctggcctgtgcacatcatttttataaaccttggggggctcagaaaagtttatttgtggatcagtatggcaaaacatgattcattttcactggaaatgccgaattcgagaacatttaaccttctttattgagaagtcacatgatttttattctctcaccatttgtcaaaatatcacaaccagcttttcagcccccttaggaaacacagggccttgcagaagaacggttaatggaactctgtcccaaacttgtccccgcacggaccacgtcaccttctctggagctgcagtggggtcgtctgggcaggtggtggcccggggctgcagtcctggggagctccggctgcgggggggacggtggccactctgctgcctgggagctcaggaaggcggtgtctacagatgcaggtggaggctcccaggccttgtggtgcctgctgtgccaagctagtgtgtggagagtccttttgtccttttgggagggcagaagggatctttggacttggaagtgaattgttctaccacacttggaggccctgccacttcctgcgaatcgtgacatcagaaataatggactttgccccagacgaggcctctggtcaggtcgttactctggggccctcctgccccactcacctgatgaggaggccgctgggcagccgagcctgtgttcattggttcgtgtccacaggaaggacctttccttagcaaccaccactcattcctcacctccctgtttctttccctccgatgaaattccatcacggggactggtgtccaccgtgagctatggccgggccgactctgacacacatcttggctagtgcaggcatgtgtggagacatccctcgcctcctaagcacggaggacgccgactgctggggacagccatgcccaatgccgagggcccttcaggtctccctgcagctgtgccggttcctgccgcaggctccggtgcctcctgccagttctctggggctgttagttttctgggctccgcctggtggagcccgggacccttcagaactcaggctcttgcctgtggccgcctacttttccagacacagctcttcctcccgatccctgcacttccttatttccattttctttgggatgagtgagccctttgttgccagcattggacctgtggacgtggacgagcgagataagactgtcgcgatgataatcgctgggaaagaaaaagatctgtggtgggaggagactgcagtgaatgagaatgaaaaggttgctctgggctcgtggctcggtggctcggttgcgaggctgagatggctcttctgattctgaaagctgcaatgagcagcacattttcaaaacagcaccgagggctgtggtatacacgcacctttaattccggagcacatcttttatcttctctgtgaaacaacgtgagcctgtcagcgtggaaggagctggggcatgggtgccrttgacctgggactgtccagcccttcagccctttgtcacctgcagacaggagtagcggtgaaggcaggctttgctgcggttttaggcatgtttttgtttgtgagaaagtgagatgtattttcctgagtttgttgctggaagctttctttgaaggtagcattccatcagtgaatgcatggtgagggctgatgtgtgggggttggtgggccctgggggtgtggcgaagggaggctggccctcccctccaaggctcaaggctaatgaaaaaacagaagagtacgcggcctccatgccaatccctgcgtttcccttcttctgttttaaacggcaggtttcattatgatttaggacggcaagcccgagagatctgggtacagctgctgttgaaacaacagtttgttacttacagattttgagaggagggggcaggccacgccatgggtcgatacagggatgcgccagcgtcagtccggaggctgggcgagggcaaggcagggtcgtcagggacaggactgcccagcttgaatagttccagccgctccggggccaggggctgcccgtgtctggtccttgccccagggtgactagggcagyggcctggagtctgagcccacagaggcggaggcgggcgtgggctccggatcgcagggtttgcatgtggaaagcctgcgtggagtgggtgactgttcactatctgggaattggctgttcgtgggaggggcagcccccagggtcagcagggccccagatgtcagagcatcagaaatgtggggttaatacggacacttcaacccgaaggtaaagaagccgccactgtctgccgaacaattcagaggcctcaacgtcggccagagcggggcactcggccaccccagcaggggacatcggtggcagtgaacgcccagcacgctccgatcagaacgcccgtgtccgtcacacatttcgtgtacagattgactttaaaggactctgtccgcttcatcccatgctaaactacacataatgctgtctcagaaatgcctgtcatggacgttcaggcctttacatcagagggtcttagtcatcaacagcaagtctggagtggcgctgacaggactcaggttttcaaaggggaaaatcagagggtcatggctgtgaccctttccatgcgagaccctggtgggggatggggtgcagcagagagtgttcagaaatgaagcaaaacacttcaaaaaatgtgtccttacagccgtgtagcaagacgccccctgaagaaccagcttcaattaatgggcaagagagactgcacttaaaaaattttcactcaaagaacccaccacaggccatcggcacttgtgtttggaaagtcatgcgagtctaggcggccccagacactgactcctgtcctgcgtatgcagtgaacggggcacgtggggaccgggtgccggccccgctgcctcggcatggactagacacagcctgcgctgtggagagaggacgggacgtgcggctgagtgaacgggggtgccacaggcagtgccactgtcgagccctgtgcagacactgcaggctgcagcccaggcctggtgatgcatttgacgcagacaaaaaacctaaaatgcctacatttcttaatttgtaaaaagcagaaataattcctcckcttctattgtagaggattgtgccgagatccctctagggcagagggtcrcagtgggatccctctagggcagaaggttgcggcgggacctgtctagggtggagggtcgtggtgagacccctctagcgtggagggtggcagcgggacccccctacagtggagggtcgtggtgagaccccactgaggtcaggacattctgtgtcccctctgcgtcactctgccggtgtcgttcgggaaggtagagacgtggccatgagctattttacataaacctttatgaggacagagatttcaacactgaatacaaaagaaagtcaggttttccttcaaagctcggaaatgggcccatgaaccttctttagggcagagtctttattgctgctgttgagggggagtatacacacggcgagatgcgcagaccgcaggtggacacgatgacgcgttggacgcatgtgggcctggaaccagcggccacgctgcacggcacaccctcacacccgacgcttcctcctgccccagccccacctgcaggtgatgcggctctggttgccctgggcagacctcgcccatccttgaacttcatcttctgttaacaggattctgtggattctctggtgaccggcttctctcactcagcctgactggttctaggtctgtcccccttctcgtctctgtggttccttctggctcagtgctggtgtggatgtggcctccttatccgctctcctgctgccgggcacatggactttagactctgtctgtggaactatgaggagtcaggctgctacccayagtctcrtttaactctcatggttacgggtttcacttctctcgggtaaatacttacgagtccaatttctgggtaatacggragatgtccttttggaaaagactttcctttctctgttgaaacgccctggcgcctttgaaacagtctcctcggagttgtcactgtgccacttcctggacgcggtgaggaggcttcagctccctctagcctcttgtgccatccagttcatgcctgcagctgttttatgaaccctaccttaaagtggtaataatttttccttgctaacaatcagttgttttttagataaagtaagaggagaaaagaagacggtctttcttgtttatgtaaccacatatttaccctttcaggagctttttggctcctcccgcagctctgggcttctgtgtggtggtgtttctcttcagcctgtgtgcaggcccacagggacccactggctcagctttgttcacatacgtgatatgaaaatgtctctcctttaccctctcgtttgaaggatattgtcattggatataaactcctggattgaatgatttttctttcaacccttcaaatgtggcattcattatctgtaacgtcaaatgcctgactctgcacattgtatgaaatacgttgttcttacaggacatgcagggtgtctggcggcctctgcgctcctgggaccctttccattctcatgtgtggagcgtgtcttccccccgccccgcccccgctgctttccaggaatcttctccatctctgacttgcagtagctcagctgaagtcatggcgtggttctccttgcattttattatcgtggaacttagtgactgtcttgagtccctgagtgacaatccttcccagatttgagagacttgtgggctttctttcaggtgtttctggttcctttcccgcccccccgtgccctcctgactccgacggcttggatgccccaggggtgactgaggttctgcagaacgtctcccattctgttcttccaacgatgatcgcttctatgatctgtcttcagattcacaaaccgtttcttccrttatgtccacccgtaatggacataaattttaratttcagacgccgtgctcttcacttacagaatgtgtgttggattctgttttaatttccccactctgctgagcagcgggtgcacacatctctccgyggttatggcagctccacaaatggccttgtctcctsgctctaatcatcgactgccctattctcaatttcgggttctgtttttctgcctcctcctgcatctgttgctgcttgtgtgaagtgggggcctagaccctgccaccttcctttaaggggcttttccggcagcagttactttcttggacgaggctttgaccctgtgtggctgtgtttagatgtaattagagttggtccatgctgggcagggtgtgctgggcagggtgtgctgggcagggtgtgctgggcagggtgtcctgggcagggcgctgtccttgccaggcattgtttctccttctgccaagtgagggggacacagctcatcccattcttttatcctctggaggacatggtgaagttgcctagcccatctctcttcctggcttggtcattccagtgttttctggaagctgtgctttccatcctcctgagcgcgtggatgagtctgtccttccattctgtgggttttccacctctggggaactgaactagtgatggttacagggtcaggtggatttgagattcaagtccaatatcccaatcttctctgagcactggcctgcgcctggccctaggtggccactgccttgggacgccgcagacgcccaccacacccctatggtctggaggccstcacctttgcattcgtccacccacaacgtccttgtgtttgtgtgtgtgcccctaggagcacggattcataccctcctgaaggacctgcagaggcagccggctgaggtgaggggcctgartggcctggagctggacggcatggcygagctgatggctggcctgatgcaaggcrtggaccatggagtagctcgaggcagccctgggagagcggccctgggagagtctggagaacaggcggatggccccaaggccaccctccgtggagacagctttccaggtgactscagcrccatgggtgcccacacccaggggtgctgcggggaggggaggcctcagggctgtgcagagactgctggctcaccaagtgcaatgtgggctttctgctggggagatggggatctgtattaatgatttttatctgtttgaacttttgcctctaaaagctttcttaacagactaagcctaccagagcaattaygttgaatggcaaattgctctctgcgaggaggtttcactcctccatgctgaggctgagtcaggaaaacaggcgtgatgggaagtgttgtgtttggactgtgtaccggtgaatattgtcaaatatttgaatagcagagtgagaggggatcattcaaatgtctgcttgkggcgtgcattggtcctctgaggctgctggggaagcagaaggcagcccctcagcaccactaccccggcaggcatccggagccctgtggaggccccatgggtcagccaggacttctgcagcctgatggcttctcacagcgtggagctgcaagaaagcacctagctcagctccccacacatggcagccccacaagtacgtgctgaaaaccaaatgacagacgtgcccctctctctgcacgggtgcagagggggccttgctggaagctggaagcctgacttggctgacaggcagggtgcaggggagtagtggaactgcaccccgggagggcctgtgttaggtggtcgcccagtggttgaaggaatcgggacccgcaccakggctaggagggatgcaggaggccctggtgtgcgtgctgtctccaggggcactgttcaggtgccatgagtcacgcacctttgggcactgaaagtaggatattaattwatttatttattattttattttattttttgagatggagtctctctctgtcacccaggctggagtgcggtgacgtgatctcggctcactgcaaactttgcctgccgggttcaagtgattctcatgcctcagcctcccaagtagctgggattacaggtgtgcactaccacgcccagctaattttttgtatttttagtagagacggggtttcgcctgttggccaggctgatctccaactcctgacctcatgatccgcccaccttggcctcccaaagtgctgggattacaggcgtgagccaccgcgcccagccggggtacctatttagagagaaacgctgaccacagtgaaataacctaagtcagtggattctgaagccatcttaattgtgaggtggttttggcgaagscttcactttgctttttcatgacgtgaactgctcggtacgatggggtttttttttgccgtgagttaactttgtcgatcacgtgagacccccagagctgggtgaggtcattgtggctgccttcacgtctaccatttagctcctcagtcccctccgctctcgcgaagtttacagaatgccattttgtgctataaacagaaaaggtttactctatggcaggacttaggccagcgtcatcacacctcacctttcgtatggaggggtctgcagggtcaccctttttatgtctgtggcaccctgtgatgacattcttgatgagggtcttggtaacactggtgtcttttacagatgacggagtgcaggacgacgatgatagactttaccaagaggtaagatgacgtctctggtgtttgtttcatgttaaatgtggaagttggtgatctttttgttcatggtgtgggaacatttatgaaatacaaaagtttttttcccagaaaattatggagaaacccctcataatctccaaattgaaaaacagtataaagagaacatacaaaagtgtgtatatttggatacgaaatatctcttttcaaattataacctaatttatccatggtagaaatatgaaagtcgtggtaaatgcaaagaagaaaattaatttttcctggaatttcccagccaggattatcacacggcagcctgtgcccactttgcacatttgatgcctcctgcatgtgcggattcctgaggggttcagctcactcacacctggctgtcccgtgtggcacctctggccacatgtggccatctaaacctatatttaaattgaataaaattaaataaatgaaagatgcagtgccttggccgcactgggttcaggtcggcggcacgttagtcgcatgtggctcagggccaaggcgctggatgccacaggaagaggacggtccaccatcccagagcccccgtgggcactgctgctccggaggcagtcagaagaagggcccagtcgcaggcgatgtccacgarctagacactggccttccctgttaagtcttttagcctcttagtttctctccctttaagaacctttggtygtgaatacaaggccgaaggatgaagaaccgttctaagcaacagcagtgacattgcatggttctgggaaayccagttttgggggtggagaaagaagagtctttggttagtcattctctcctcagattctcttactggttwgtggttccatgcctgttggcaagtgcaggaagaaaacatcagcagttctggttttgaatatccatcagaaatgatgggacctgctgtctgagctgtggagggagaagtggggctgagaaacacatttcctaatttagggagtcggggagacccagccctcccacctgaggggcagggagcgctctggggggctgccgttagcctaagactccctgacttttagaccacaggcttttcatcctccatgcgtggaattctgactcagttctctgttgtttggggtgtattttcaagcaattctgtttctcaaaaagggtatgtgagtgttgtattttctgacttcttatttatttaaaaacatctttctttttcttctcacatgaaacacaatttaagtgacaatattatgctttttcctagctctgtttagtaacgtcaacggctacatcctattgtcattgaggatccaaatttgagcagtgtttttatcacactactattttgtttaaattttaaaaaatacaaaaggaaaagttgtaatttgtagccaaaatgggaataattgcctctatagtccttccttaattttcttaaaagtgtgttttggcaaagtgagttgtaaagtgaatcagattttcctgtttacatctaatataatattgaagatataatttcatggttggaaaaaaaccctgccaagtagacataagrcttttggcatcacatgcaccaggaggtgtccgtgggttgcctggtatgtgccagtggcaggagcagacccggtctttcctaggaagcagtgtagggtgcctgggagggcagtgcggcccaggggtggagatcatgtctttgatggcccttagacctgagttccaattctggatctgataatcacgacttttgtgatctggtaccaataatttgatatttaacctctgtaaactccagagtctacaaattaaaggygaaactcaccctttatttatggggttggagtagtaattacatgagaacccacacaaagcaaatctgtacccggtgcatagtcagcagaggtgccagggggttccgagggatggcttgtccaggaaaaggggatccggctgggagactgtagcccgtgtgaggaccacagatccctcaggtatcgttagaatcaattacacatccctgtgatgtgcccactygtgggttaatcgctttgtgcctccgtctccccttctgtgaactggggttactgagggtgccccacccacaggcttacgtgaggactcagtgtgttcatgcagataacgcatttagtacagtgcctttgtgtgctggaagagctcagtcgwtgcaaatttgttattattattattattatttagtgttcattgcttctagagggctggggtgggatcttgatatcacacagtttatttttaaaaatatcaatgccaaagacctacacaaactctacaaaatctgattcttcagagaggtgtgtgtgtgagcatgtgtgtgagagggagcgggagggaggagaaaacagcacgtaagtgattcggatactcagcgccctcacacctcatgctcggctagacatcattctaaatatagactgcacacacttcgccttcctcccacactctccttccaggctgcccatgtcatccccacagtgactctgtcccgggcagcccttgattgcatgtgtcacatcagcattcctttcgcagacgtccctcacggaatgtcctctctgtcaggtccatcgtctgagtgccacactcgggggcctcctgcaggaccacgggtctcgactcttacctggagccctcccctttgcaaggcccctcgacatggagaggaagaagtccgagcaccctgagtcttccctgtcttcagaagaggagactgccggagtggagaacgtcaagagccagacgtattccaaagatctgctggggcagcagccgcattcggagcccggggccgctgcgtttggggagctccaaaaccagatgcctgggccctcgaaggaggagcagagccttccagcgggtgctcaggaggccctcagcgacggcctgcaattggaggtccagccttccgaggaagaggcgcggggctacatcgtgacagacagagagtgagtagcagccctggctaagctcctgtgtgccgagggagggcttgtcccagcaggctggaggtggggcgcctccttgctgtggcggatgcatacgcttttaagtgtcttcaactgaataatggggtgcaggcatccctggagtctcaggcgcggagggcagccaggtgcctggacagtggctcctcctgatgcttctgagctgggctccagagctggagagccgttctctgaagggcatcaaacaaaaccaaaccaagcaaatcccttcctgggtttttggtcctgactggtcacctgcaggccgcgcctctctgcgggtcagaatcaccttcagcggcggccaggcagggtggggtctcggggcaggtaagtgtacagcaaagcctgagcacggcccgcgcgggaatgcgggatgggacgcggccctggaaactgctgcaccccggactcctcctgcctgttaggaaggactccaggtgctttatctgttttgcaccaaagtggcccaaatatcctggcgtgggcgcccttcagaaggaagaaggggcttcacagcagcgagcctctttccccgccctcatgtcgatctgaacttaacgagtctcagaattcagacatcacgggcccagcaaggcacaagtggctggcccgttctcaggtcaccccgttaatgaatctgacatttgatgctttgctttgtacaagtgttgtgttttcttcaagtgatagaattggtgtttcaaagagaaggacgtgtctgcctggmtgtacacacacccacacgtttgtatgtgtgtgtatatgagtgtatgttgggtaggtgtgtgtgtgtatgagtgtgtatgttgggtagatgtgtgtgtatctgcatacgcatgtgtgtgtatatgagtgtgtgttgggtagatgtgtatgtgcgtgtgtgtatagtgtatgttgggtaaatgtgtatctgtgcgtatgtatatgaatgtgtgttgggtagatgtgtgtgtatctgtgtgtatatgagtgtgtagggtagatgtgtatctgcatctgtgtatatgagtgtgtatgttgggtagacatgtatctgtgcatatgcatgtgtctatatgagtgttggatagatgtctgtgtatgcatgtgtgtgtatatgagtgtacgttgggtaaatgtgtgtgcatctgtatgtgcatgtgcgtgcgtgtgtgtatacgagtgtgtgttgtgtcgatatgtttgtgcatatgtatgtgtgtatgagtgtgtgtcgggtagatgtgtattggtttgtgcttatttgcatgtgtgtgtatgagtgtatgtcgggtagatgtgtattggtttgtgcttatttgcatgtgtgtgtatgagtgtgtatgtcgggtagatgtgtatcagtttgtgcgtgtgtgtgtgtatgagtgtgtatgtcgggtagatgtgttatccgtatgatgtgcatctgttcgggtatttcgttgtgtgtatctgtgcgtgtgtgtgtatatgtgtgtgtgtttggtagatgtgtatctgtgtatgtacgtgtgtgtgtatgtgtgttggataggtgtgtgtatctgtgcatatgtgcgtgtgtgtgtgtgtcaggtagatgtgtatcggtttgtgcatatttgtgtgtgtatgagtgtatatgtcatagatgtgtatctatgcatatttacatgtgtgtgagtgtgtgtgttgggtagatgtgtatctgtgcgtatttgcatgtgtgtgtatgtgtgtcgggtagatgtgtattggtttgtgtatatgcccatgtgtgtgtatgtcaggtagatgtgtatcagtttgtaggtatttgtgtgtgtgtgtgttgggtagatgtgtgtatttgcgtatttgtgtgtgtgtgtatgagtgtgtatgtcgggtagatgtgtatcggtttgtgcgtatgtgcatgtgtgtgtatgagtgtgttgggtagatgtgtgtgtatctgtgcatatttgcatgtgtgtatgagtgtgtgtcgggtagatgtgtatcggtttgtgtgtatgtgcatgtgtgtatgagtgtgtatgtcgggtagatgtgtattggtttgtatgttcgtgtgtgtgtatgagtgtgtatgtcgggtagctgtgtatcagtttgtatgtacccgtgtgtgtgtatgagtgtgtgtgtcgggtagatgtgtattggtttgtgtgtataagtgtgtgtgtatgagtgcgtgtgtcaggtagatgtgtttcagtttgtatgttcgtgtgtgtgttgggtagatgtgtattggtttgtatatacgtgtgtgtatgagtgtgtgtgtcgggtagatgtgtattggtttgtgcaaatgtgcatgtgtatgagtgtgtatgtggggtagatgtgtatttttatgatgtgcatctgttcaggtatttgtgtctatgcatatttgcgtgtgtatgtatgtgtgtttgttgggtgtgtgtgtatgtacgtgtgtgtatatgagtgtgtatgtcaggtagatgtgtattggtatgatgtgcatcttcgggtatttgtgtgtgtatgtgtgtatgtgcgtatgagtgtgtgtttggtagatgtgtatctgtgtatgtgcgtgtgtgtataagtgtgtgtgttgggcaggtgtctgtatgtacgtgtgtgtataagtgtgtgtatatgagtatgtcaggtagtgtgtcgatttctgcatatgtgtgtttgtgtatatgtgtgtgttgggtagatgtgtcagtttgtgcatatgcatgtgtgtgtatgagtgtgtgtgtcggtagatgtgtatcggtttgtgcgtatatgcatgcgtgtatatgagtgtgtgtgttgggtagatgtgtgtgtatgtacgtgtgtgtatgtgtgtgtgttgggtagatgagtattggtttgtgcatatgtgcatgtatgtatatgagtatgtcaggtagatgtgtattggtttgtgcgtatgtgcatgtgtgtatatgagtgtgtgttgggtagatgtgtgtgtctgtatgtacgtgtgtgtgtatgagtcaggtagatgtgtattggtttgtgcatatgtgcatatgagtgtgtatgtagggtagatgtgtattggtttgtgcatatgtgcatgtgtgtatatgagtgtatgtggggtagatgtgtgtatctgtatgtacgtgtgtgtgtatgagtgtgtgtgttgggtagaagtttgtgcatatgtgcatgtgtgtatatgagtgtgttgggtagatgtgtatctgtatgtacgtgtgtgtgtgagtgtgtatgagtgtgtgtgttgggtagaagtgtgtgcatatgtgcatgtgtgtatatgagtgtgtgtgtcgggtagatgtgtatcagtatgatgtgcgtctgttcgggtatttcttccttggtgaagaagtacctcttattttgaggatcattcgcactggaggtgggagctgcatgacagctagaacccatctgtcctgcgggctctgcgagcctcgcagtgctcgggctggtgctgtcgctgtgctgsagatgctacatttcatcagggagaattagctgcatatcataattgggcagaaatattttatcttgagctcaaaccgcagagtgtgtatcaaagccaaattaaaatttaagatgattttcagctgtaggtgattatcttagttgtatctttaggtaagttgtaagcagcagaaacttgaagcttacactaaaatatggactccattttctcaagactgctttacataagtcaggatgagctttcccgtttccaggctctaggcgtgatgcaggcctcccacgtgtctgtctgtgcccttgctctcctgtttgtagagtcaggaacttctcatggctgttcatttctttgctctcaagcccagtggagaatcacaggcaggccctaagtgatgtgttctgaggctgcgtgtctgcaccagcagagccaaggggaggcgcctgcctcagcactgggtgacgcagaccattatcatgaccgattcttatgggtggtcaaacgccctgtgctgtggacgtctccctccctaggaaacactgctttgtgtgtggtgtgggtgttatgtgatgtgtgtgtggtaatgtagtgatgtgtggtgtgtgttgcatgtggtatgtgttgcatgtgtgttgtgtgtagtgtgtgttgtatgtgtggtgtgtagtatgttgcatggtgtgtgtgtgtgctgtgtgttgtggtgcacagtgtgttgtatatgtggtgtgtggtatgtagtatgctgcatggtgtggtatgtgttgcatgtctgttgtgtgtagtgtgtggtgtgtgttgtattgtgtgtggtgtgctgtgtggtgtgtgttatgtgtagtgcgtggtgtacagtatgtgtgtagtgtgtggtgtcctgtgtggtttttggtgtgttgtgtgtggcgtgtatgtgtggtatgtgtgtggggtgtagtgttgtgtgtcgtgtgtggtgtgctgtgtggtttatgtgttgtgtgtggtgtgtagtgtgtggcatggtgtgtattgtatttgtggtgtgtgtgcatggtgcacagtgtgttgtatatgtggtgtgtgtggcacatagtgtgttgcatggtgtggtgtgtgttgtaggtgtggtgtggggtatgttgtgtgtgtgtgtgtgtgtttggttgcctgtgtctcctcactctgtgctggagccctcttttctcctgaaggcccccatgttgtgttcgtggacactgtgtgtttccctgcaggtgtcctggggacttgagccacccttgcagggggacggccgcccatccctgccccggggtaggagagtgccccagagaaccagtgatctggtcattttaagggctttccaaatggatgccgaggtgttcacccggagagcaggaggccggtgtggtttgctagggaaccttcagagccgacaatcctgtgccattgctgctaatgggctcaccctggagggaaggacaggagggcccctgtctgcagcagcctcgcactttctggggaaggagacctatcacattgggtcatttcctgtctgtgcttgtgactttccagtagaaaaaagctagggcttttctttgcattcgagtttattttcttgtagtgggtttgccggccatgccttttggactggaatatttacctcctatgagcagtgggttaaagaaaaaaaaaatcatcatgttatcttggctgacttcttttcttttcctttgcgacttcaactggttggaagctatctggtgaagacagcacagctttttgtcagcaatttgtactgcttgagcaaggtgtgatgcactaggtgaggtctcctctcttcttgcaaggagattgaggtttttgccctattatcagactaataatttgtgattctcttgggcaagttttcaccagatttcagcttaaaccttaacagatcagctattaatttccaagacacagatggcattctttaaaaaagggggacttttgtacatttggttgtcccacagaaaggagaggaatgtggtttagaactcggtgtcacctcagcatccacatgctcttggtgctgaggttcagatgggaggatggtagggstcggcttttccaggcatgattttctctctcacattttctgatggacacagtaatcctttgccatttacatttttatcctttttacaaactagagggattcttgaagactggacgaagggcaggacagccgccccagtcctccaaggacaactttaaaatgatttcatgttaggtttccagaaggaatcacaggacggacaccaggtatagggaggagggagccccttacctctcagcaaagaggaacctgccttctaaatccagaggcaagagcttcagagaccacggctcacacacacatgcctctctctgcctaccccagaccccactggattgggatgtattctgcggaacgaccacgctgagccagtgaggtggattttggggaagtgaaacctgtagtcaggaaaacatgggagctgaggcagaggcttgagtctggggtggcggccacagtgctgttggagaaggtggcctgggcccttgacccacggaagtccggcatccagggtcagggtcccacggcagccccgagacctagaatgtggcaaacgcccctgtgcttgggtttcytggtctctggagtggcagccgcagtgtgtggctcctggactgtggagagatgaacggggctcaggtggagcagagcccgggccacgtgcagaggatgcagggcgcaagcagaggaggacgcagggtgcacgcagaggaggacgcagggcacaggtgcacggatgagcagcctctgtcagcagtgggaagaacacagtgttgcttgaaagaggaggagccaatggatttccacgaggggaagctggagaggttggagccctgagtcttgcggggaggccggctgagggaagaatgtgcaaaaagtggcatggggcggcgttgacctctccgatgcctctcaatgctaacaagggagacagctgcagctgaaatgtttcttccttcaagtgtttcttatgacaaaactttcttgcacctcggagaaggcaagcagcaaaatggcagatggtaccgggccaccgttaggggctgctgcgtgctcacctctgtgggggttcagttggaatgtggaattcagagaggccagtgaaggcagggatccgccggccagggagaggaactttggaaccagaagtctggaaggaggtgggggcttcggtctctccatctgccaccctcagtgagtgccctggccctgcaggttcccccagccccttcctcggctcactgtgagatgtgaaatgtgaaacccaccgagtgctcaggaaccactgcccgctctccgggggctggtgtggcggagaggaagttccgccgcccgctgtcctgggggctggtgtggtggagaggaagttccgccgcccgctctccgggggctggtgtggcggagaggaagttccgccgcccgctgtcctgggggctggtgtggcggagaggaagttccgccgcccgctctccgggggctggtgtggcggagaggaagttccgccgcccgctgtcctgggggctggtgtggcggagaggaagttccgccgcccgctgtcctgggggctggtgtggcggagaggaagttccgccgcccgctgtcctgggggctggtgtggcggagaggaagttccgcygcccgctctccggggatggtgtggcggagaggaagttccgccgccgctgtcctgggggctggtgtggcggagaggaagttccgccgcccgctgtcctgggggctggtgtggcggagaggaagttccgccgcccgctgtcctgggggctggtgtggcggagaggaagttccgccgcccgctgtcctgggggctggtgtggcggagaggaagttccgccgcccgctgtcctgggggctggtgtggcggagaggaagttccgccgcccgctgtcctgggggctggtgtggcggagaggaagttccgccgcccgctctccggggctggtgtggtggagaggaagttccaatcctagtggctgcccaggaggcctcaccgctcaggagcccctcaggggttcagcgagaagagcgcatcacgagaaccagcagggtgccaggacrgggtgcagccgaggtccggactgatgcttcctgctcgtccttccttgttagagtaaaggaaaccctgaggatgctgaagatggattctgtgtttctggcgccagggcagatttcaggggttctgttttgttcttcagcctccacgctgtgttgtgacttcctgttcagaaagcgcagtcctcacctctgtagaggcccctcctgagggcggacatgccctgccttgtcacttgctcctctttgctttgtggtcttaaaagaatatctktagcatgatggatttattatcatttaagaagatttcaggtggtgtggggttatagccccgatgggtaaacatgttcacggttgcttgtacattagaagagaagaaggcgagaaggagtggcatgggggtggggcaggaaaaagaggaagaagaagtaaacaaaaactctcccaaacctcagcatccccgacagtccagcccatcctgctgggagcggccrtgggaagtacgcgaggcaggggggtggccgtgggagggacgcgaggcagggggcggctgtgggagggacttgaggcagggaggtggccctgggagggacttgaggcagggggtcggccgtgggagggacttgaggcagggaggtggccctgggagggactcgagacaggggggcagccctgggagggacttcaggcagggaggtggccctgggagggactcgagacagggaggcggccgtgggaggcacttgaggcaggggggtggccatggttgggcctgagccatgtctcgccagcccrgcagctcagtgggctctgtgccccacccggctccctccatggccagctgtctcccctcctatggctccatccatgctgtctccccttctcccctcttcccttctcccaccctggtccaggccatctgagcctcttgcctccgcactgcggggccttctctcttgcgcaccagcatcacggctctttctttctcacccgccgtgcacgttgaacccaaagaggactcgacaaaaccaaatctggccccgtcaccctctcctgttggaatctggctgtgactccactggtcctgagatacagaccccagccccagcgtggcccaggctgaccagcagctctgcaggtgcatcttggggacactccaccaggccctccctcygccccggcagctgggctcctgcagaaggtcccagctctgcacctgtcccgtctgggaggcagcttcctgttcacgtcttctccccattcagagaggtctgtccacacccctctttcccaagtctctttgtcaccaattttccattatgtttcttcaagactctgagcatctggccaaaccattggccatggcctattaatttgtaataatcacacatttggctatttctctttccaagcaaagtaaaccagatgtacagcctatagttctgcccattggagaatttcccttcaccgctgtccttttarggatgttccagaaaggggcagtagtgctgcagttgtccactaacgtgggggcctgcatatcatgcagaaccatctgtaaaccaggcccaggtcttcctccgtcagctgattttagggaactctccaggagactgtaggtgcaggctgggagagagaaggcagcatagcgggagtggggaccgttggcattggyggcacttctttatgtaacttgtgcctttagggcctacttaggcccagacacataccacttccatttgatgatggaatgctgctgtgtacacccaactttctggcttggtgggtcggaaaacattcagttcatgatgggcaactcaggtcccatggtaacttggtggtccatgtcggcacgggatctgaggtcgaatcagattagagaaccagctccgcctgggtcggcacgggatctgaggctgaatcagattagagaaccagctccgcctgggtcggcacgggatctgaggtcaaatcaggttagagagcctgttccgcctgggtcggcacgggatctgagatccaatcagattagagaaccagctctgcctgggtcagcacgggttcacggctcctgctggaggcacttcccgatcctatttggcacactttttaaaggtgacgctatatagaccttccgtacctagatctttagttagctgctggcatttaaaaagtgtttatagtgagcagtacagtctcatccttatgccaaaaaataagttgtcagaatacagtggttttcctctattgattttctgcctggaagagtcgatggtgtggacagccccactagcagtggtccagggtcgttggcctgggtgcggcacacgagctccggggctgcatggcggtccgcaggaggaaggttcagtttgggtgcacaaagcatcaaaacctccttctcccagaccctgacattagactcctgcaggaagagagtgggcgtgcaggggatccagggtggagacagacatggtgtcggtcactgcggcgtcggtcaccatggcgtcggtcaccgtggtgtctgtaggatactgtggcgcctgtcagtcaccacgcgttggtcagggcacctccccagcccactgtttgccaccctcgaagcgttgcttctctgcatgggggaggttcccgtgggctggaaacattttaactactttataagatgatttaaatagaataaatttcatggtttgttttaatgatgaacagggataactagaataattggttgatcccaagaaacctcgtttatctattggttttgagtattgtcttatcaaaagagtttatatcaaagttgactcattttcccttcacatttggctccctagctcctggtgggttttgcagtaaatagtaaaatgtcccagatcgggctggtgaagctgcagaagcacagagcatggtcagcaggagggtcggtcatggcgggtcctgttcttggcttgatttcatctggcccacaaggaagaggcagtaacaaggctgccaaaatgagacgtggagaagttttatgcaggcttccttcggttttgttaagaacaagtgtaggtcgcaacaggtccccgggctcaccccacctttctgggcacctacgttggaacatggcctgaatgataaagtgttccgtttgagcttttctcctgggagtttcctagtagtgtaattttgggcaatgactttagtttctctagcctcggtttctcttttaaatgaggccaataatagtgtgttcctcaggggtctgctgaatgccagatcccaccgctgtgtggggcctcagtgtggcgtccagcacaggagcttcccagagtttttactactctttatatttccgacccctacgtacttttcactagtctgatttttaggggtgacactcccgtagtcattttctgctcatgcgtccacccgtgcactcatttcggggtgacgtggatgccacacggaagacccagcactgtgccggggctgagaggacaccgtggaagagggacactgtcacttcttactctgagcctccctccagtgagtgcttgccgaggccttagggcctcccatgtggctgattcagtagatccataggaacaggcttgtccaacgtggttgagcttagagacgtcacaaacttgccactgtccttcagaactgaaagactctagagagaggagacrccatcttcagctttgaaagtcctttccactgccctcacaggcactcctagctctgaccctgaccccataaaagttctcatgcctgtttctcttctacggcaatattagtgtccaggtattgagggtggaagccgccacatgcagacacagcacgtcgcacctgctggatcctcccactcattttcaggatgacgtccaactgctttctaaggaagttcaggcctcggaatgacagatgatggctgtggctttagagatgaaataggaatggctgcgtgatcattgtgagcacagtcagccctgtcttgtttgtctgctttacagaatggagccagcactcttctgctttacagaggagccgtgatgcccctgcccacctggccggcactgtcacccttgccaggctgaggaaggaagggagtggactgcacgtcccgtacactttgtataactggggacaccttggcttgtggaggcagcgggttcacaaacacattctgggcttgtggacttccttgttgtgttcagggtgttgtaggagtcttgtggatgcttctgttggtttccatattggagcatggagggcagagggctgggcccaggattcgtggtggagcccctcccatgtcctcataccatccccttggtttgaaacatgctagaaaaggagactcatggaatttggtagcaaacattgattgggaagttggcttatgctccgcagggggcagtaggcttggaagaaacaaactcagatgacacgtggctcctgccctcaatgagtttgcagtttgtagggggaggcaggattaaaatatgaaagtactggagaccttttaaaataagtcatgagctgagtgrtgctgatcaaagcacacagggagttttagggaaagcctgaagagcagcagtttctgtctttgctgattggagtggtgtggtcggtcctagccttctccacctgcccttctgcacctgccctcttcctaatggctccaaggatggggaggcccagggaggctggggtgcagggggctgaggcaaggcaggtcagcgatgggagcaggtaggctggccctttggagcagtcaccaccaggcccaggcagagagaaaagcccaggctgctggggagcacaggagccgggaggaaggaacctgcagccacacgaaaaaaaggaagggctcatctggaagcatcgcacttgcctgccaggagggtttggcttggagcagggaggctggttggatgcaagtctggagttcccagcagcctgggctggtctcagcyggggtggagctgagccggctgtggtgggtcattgctctgtccagctgcagcctgagtttgtctttgtagccccgcctggctcccttccctgttgcctcccttctggcccaacatctggccattctgacactttttctggcaccagtgcccttcacaagctgttcagatggccctggaggatgttttgggacaggagctgacctgggttagagcagacatccaaaatgtacaggaaaagagaggacatctgggacccctccccttccagcagccactctttaaaggaaaatggcttgtttctcaattgtaaaattacacagaatgcagccttgaaaaatccactttaaagaacacgccacaggctttccttggagacagggagcagaaaggagctttgccagggatccagcaggaacttggctcagctttctccgtgagccacaaggagtgttctgctgaaatagagattggacgaaggctggtacactgccttggatgtggggagcagccacacgtcatggtgcttttatactaatcaccttgtttcatcttcccaatttcttgtattttattaacatatagataacataaagtttactgtcttacccatgtttaagcatagaattcagtagcgttaacatttgtgctattgtgcaaccatcaccgctgtccatccccagagctcttttcatcctgtaaaactgaagtttcatccccattaaacactaccctaccccagcccctggcagccttcactctactctgtgtctctctgaatttgaggattctaggaacctcacatgggtagacacacagaatttgtccttttatgcccaggttatttcagttaccatcatgtttcagggttcatccctgttgtcgcatgtgtctgaatttcttcctgttcagggctaaataatattctacttttggtgcaggccacgctttgctcctccatttgtccatcactaggcccttcagttgcccccatgctttagtgattgagaataatgcggctgtgaatgtgaggcactaacatctctttgagaccctgttttcaattcttttgggcaaagtagtctcccccttatctaagggggagacattccaggaaccccagtggatgcttgaaacttcagatagtgcagaaccctatataaactatggcttttcctatacatacatacctatgataaagtttaatttataaattagagtatgagattaacaacagtagtgataaaatagaacaattataacaatttactgtaatagaagttgtgtaaatatggtgtctctctctctctctctctccctctttcaaatatcttcttgtactgtacctcaggtacctaaaacacagaaaacaaactgcagctaatgggggactactgtagataccaaggaatggagttactcgatcaaagtgcaattctatttttcatttttttgaggagtctccatactcttccacacttgatataccgtgttacattctcaccaacaaggcacaggagttccaatttagccacatctttgccaacgtttactattttctgggtttttttcttcttacagtggccatcctgataggtatgaggtggtatcacattgtagttttgatttgtgttttcctaatgattagtgatgttgagcatcttttcatgtgcttttggccatttgtatattttctttggaggaaaatgtctattcaagtcctttgcccatttttaaatggtattgtttgtatttttgttgttgagttttaagagtactctatacacgctaggtacattatgaggtttcttaaatagtgatgtaaatattttactttcctttaatagtcaaaatgagaaattttacgttaaactaaaaatgtagcaataatacactcacagtgctatctcttatattaaaagaagatattggccaggtgtggtggctgatgcctataatttcagtactttgggagaccaaagtggtggatttcttgagcccaggagcttgagaccagcctgggcaacatggcaaaaccccatctctacaaaaaatagaaaagttagcaaggcatgctggcatgaacttgtaatgtcagcaaatgggaaggctgaggtgggaggatcacctgagcctggaaaggttgaggctgcagtgagcaacgatcatgccactgcactccagcctgggcgacaaaaaaagaagacattattgacatgcttgaaaacaaagactgtcatgtttatgcttatagttaatgcaaatagatatcccttgttgtgtactatagaaatagtccttaaaagatctgtggaatatcatattttgctaatctctgtcttttgattggagagtttaatctatttacatttaaagtaattaatgatgaggagggacttctgtcattttaatatttgttttctatgtgcattatggattttttgccactcattttctgcattactatcttcttttgtgtttagtagatttttaaaaattaaatgcctaaattcctttcttctttttgtacgtattatgtagctattttctttgtatttatcatagaggattagatttaacatctgaaaattacaacactaacttaaatttatactagcttgacttcaataacatacaaaaattatgctcctttatgctatttacccaccctttttggctattgatatcacaaaattgcatccttatacattgtatgtcccaggatataaactaataattgtttaaaatttattcgtttcttaaattatgtagaaaacaaaatgtggagttacaaaccaaagttataatactagttttaactagtaattgtttttaagatatgtactagtctcttaaatcatatagagaactaaaaggagttacaaaccactgttacaataatactatattttataattcaccatatatttgcctttattgagattttaattttttatatggctttgagttattgtccagtgtcctttcatttcatcctgcagggctccttggaatatttcttgcaaggcaggtctagtgataacaaactctctcagctttggtttatctaagaatgtcttaatttcttcttcacttttgaagtgcaattttgttggatataggattcttggttgacaggttttttttttcttttcctgtagcacttggaatatattggttcactgctttctgttctgcaaagtttctgctgataatattatttggaaagcctggtgtgtgatgaactgcttctttcttgctgctttcaaatgtaagaggagaattctctgtttgtccttgtcttttaacaatttagttaaaatgtgtctctgagttaattttacttggagttcactgagcttcttggatgcttatatccatgtctttcatcaaacttgggaagttttcaggtattgttcttcaagtattttctctgcccctttatctcttttttttcttttgggcacaatttcctctcacaattcatatactggttctcttagtggtatcccacatgtcccttagggttttgtcacttttcttcaatctttttttctatttcttagactgaataatttccattgtcctatcttcaagttcactgattctttatttttcttgctcaaatctgcctttgaatctctctagtgaactttttaatttcagctattgtattttgagcttcagaatttcttttatattttaggttttctctttgacattttcatttttcatacataatttttctgactttctttacatctttcttttgttcttcaagcatttttatgacaattgttttaaagtctttgcctagtacatctgccatcaggtctttttttagagacmattattgttgacttacctttttcctttgaatgggctgtagtttcttgtttctttgtttcttgtttcttgcaattttttgttgaaaactagaaattttaatctaactctggaaatcagattgtctctccataggtttgctattttttgtttatctttcttttaaattttttgtaggctgtctttgtgccaaggatcagcctgaggtgtaaacttgtggtattatctgagcctttccctgagcawgtgtggtgactttctaattttccctgtatattcagttacttttgaatattctggtctttaatttctggctcccaaaagcggaaaaagagaaaaatgaaggtgggaaaaatgggtgttagcattttaaatcccctgtaagtcattttggccagagggggaggagcaacaacartgaggaggtggccaaacaatggtgccctcctcctttcctgcacctctgtgatgagaagcagcaatcagcagtgagattgcagattcccaatatttggaggacaacatctgtrttgcctgttctggctcctgccagtgtgtgcaggctgctccaggaacatgtgcacagctgcttgccacagggctgaaggtgagtagcggtagctcctactgtgatgaaagctgacattgactgcaaggtgtatccagaccttccactagaagtcggaggccttcattaggcttcagagttcaaggatcagttacatcagacagatcctactagcacagtgttgtcaggtgggagacagattcctggtgtttcctactcaccatcttcccaaaactaattcatgctttactttagttttacagaaactttataaattgagtggggttcatttaatagtttacattttaatgatttttaaaatgttggattttttgctgtttttgacattctcgtgttcattcattcatgcagttaatgccaatgtagaatctacttgtggaatgagtacttgtgtccatgtgcagggagaggtgcatggtgcagtagccaaagcctaccccacgtgggtgaggtccttacttcaccgctccatgcagggtgtgcagagcgggcctgtcttataaaactcaagttcccagttactcacctgagcgaaccaggctccttccctgttccatctgagggtggcacagggtggagtgtgagggatgggctcagtgcagacagttgagggcccacccagtcttgtcatatcttcacctgatgccttgaaggcaacacagactccgtgtgtttgatgctgacctcaggatctttcctctgtcctggggctgtcctgagtccactcgcagtgctataacaaagcaccatggatggggcagcttagaagcaataggaatttcttcctcacaattccaggggttggaatccagatgccagtagatttttgggttcttggtggaggcacacttctgggttgcagatggcattttctcacatgaaggaaaaagatctacagagcctcttgtagagggcactgatctcattaggagactccaccctcatgacctgaccacctcccataggcccctcctcctcacaccttcaccttggggctaaagattggaacatacagattttaggggtcacaattagttcatagcagcctgcttcagaaaacagcatctgctctgctgtcccttcaaccctgcagagcccacctttctcactcacagttctgaacaccttacccgctgacacatcgcagtctatgaccatgtccacttcagtcaccattaccacggtccatgctgcttgagctcatgtctcattgagacaatctggaggccaccagctgtttcccttctgtctcctctggtctccaacctgttctttatccaggggagggaacttttgttgttgttgttgttgttattttggatatggggtcttgctctttcacccaggctgggatgcagtggwtattcacaggtgcaatcatagctcattgcagccttgagctcctggactccagtgatcttggctcctcagccttctgagtagctgggaccaggagagtgggacagtgcccttgcctaggccctgttgatagctcgccattgtatttgggataaactccaatcccttaatgggtgaggagcacccatgtagttggctcccttccttctagccatccgtgcctcccctgccccttctctcaagttctctgagtgactgtgctacccgagggcatttgcttgctgtttccatccctgcgtctgcctctcgcgctctgtgccttagactagtaacacgatccattctctcagccctgtggtagttcttggggacccttctggggctcccttaccccagcctggaccaggctcccatgtaggccccagggccgtggccggtggcttctcttttccctggggtttgccatgggttttttaatgcatattctttaccgttgttcctgccagattagaggctgccgggggccgctggctcctcctcctctctcatctctgcttccatagctcctggctcagcctggtaccacaagtgctcaggaagtatttcttagatgaagagtagagcattcccgcggcacgtcttccacatccctcccaactgatgtgtagattgcctgaagctgagcgacctacgttagtctagggttggaagtcatgtggctttgttgctgattttatggtgtgggagtttggccaaggggttcccaaagcagatgcctgaacaagtgtcagcaccagtgggaacccacgagaaacacagattcccaggcctgacctgtggcctcctgactccgaaacgctggagggtggctggggcatctgcattcctggtgagtccttggcccatcctggtgagtccttggcccactcaggtcccagagccctggactgggcagggaaggcctgtggtacgtggatgcagcctcatctttccattgctgtaaccactcccaaactggaccagctgtcaccttcacctacaaagggtttttttgtttggtttggtttttttattttaaatacactgtcctgggctccagttccagccacactggctgggcaggacaggcatgggcctggacaccctccccaggtggctctgaggggtacccagatgtaggggccaccggtctccctggaggtaccgggcttttgggacaggctcagcccctgagctcagatgtggctcctccctgagtggaaggcggcctgtgccccagctggtcccggattgctacgtgcctcgaagtcctggccaaggatggtaggctgtgtccctggtggccacaacaacagcttgtagcgtcgacgccatcagatggctttcttgttgcaggtgcgaggcccatgagaatccacctcaatgcgtctctctgtccccaggaaggattcataacccccaagaactaccctctctctccagctagtgcagctgcgctctgaggctagactagtcacggcatgcgcctgctcatgagtctgaatctgcaggccctgctgaggtcctctccccaaggggtccctgagtgtaagtcatggatagagaatgcctggggtctccagccctggtgccagttctgttaccattstcctactcctgcckaaggcctctgcctgctctgggcacacacagccatgccctacatccagcaccttgtctcatcactcctatccctatgctagcatcctagacgtcttccagcttaacagaaactgcccctcttgcccccagaaccctgggcagctcttacagtgttggccccatctctcctttcctactctccatccctccaatgctgaacaggctgcaggtccctacagccttgcagaagagctcctgtgaggtcagcccacagccatcatgacccgctaagctcggcctcagctccccatcctcatctctctggaccaatctgaggcccggcccttctccttcttggaattcttgccagctcgctgcttgcctctgtcacagtccttttcattctsttttgccagttcccctcattgccctaaatgytggggggccctcaatgctggggggccctaaatgccggggggccctcaatgctgggggatcctaaatgctggggggcaaggctccgtcttaggtgctccagcttcagtcaccctcctgaggccagtgaacacctctggtcgtacagctccccggtctcrgcattcatgatgcactgcccccagcacccagcctggacgccctgctgtggcctctgacctctgcactcacaggcacatcgcccctcagtacccagcctgggcaccctgctggggcctctgacctctgcacacatggatgcactgccctyagcacccagcctggatgccccgctggggcctttgacctctgcactgacagacacgtcgcccctcagcacctagcctggacgccctgctggggtccccatgtccacgtgtgcaggatgtaaactcctgactctgtcagcaccactcccagctgggccttcctggggcttctgcccatcttgtgttttcccagcgccagcggactccaccggcatggcctcagatgtccctccagatccccaggctccccaccggacagccgtggtggccagctcaggcccctgccccagctgacggcctcctgcactcgtctccaggccatgtccacccagctgctctgtgacttcacctcctcaccatgtggcaccgcggcccccttgccttctctgctcactgtctgataccctgtttccagctccttcacctctgttcaaacggggccccactggagaggcctcctatagcccactttacaagacagtctctcctctctgcccttccctccacagccctgcatgccacttctctacccagctgtctcctccagagaacttgtcagccgacaggagctagtctgcctgggctgctggcgcacacttccaaagtgggaaatccatcttctccctgtcctggaggctggaagtccaagacccaggtgtgggcagggctggttcccctgaggctgaggagggtctgctcccagcctcgcccctgctgctactggcctgagatgacttcagcttgtgggtggtttctccccatgtctttgcgacaccctgtgcgtttgtctctgagtccaaaccctccttttatacggacaccagtgatattggcttagggttcaccctattgacctcagcttaactaaatctatgatagccctatttccaaatcagttcacattatttgggttttaggatttcaacatatgaatttttaggtgacataattcaacccatcatagcatgattgatttctattcaccagcatctctagaaygtgaacccctcgagggcagggctggtcttgctgttcattgctgtatttggaagcagctcctggtgccctgcaggcatcctgcacgctcactggatgaggaatgcaggcgttttggtctgctggggtgaaagcctttgcggtacaacatgcttttacataatattgtaacttaatactccattaaagtggtactaacaggatttcacaggcaacttgtgactttcaacctgaatgctggccttcaggatgagtcatcaagctgcaaaccaccctggtgacggctcttgcctcttgacggacaggtccccagccaggtggccttgtggggagtctgcggccacagtgccttccgggagtgcccccgccccctgccctgagttgctgccagtgggctggctgcctggtttccatgctcacacttccattgggtagttaaattgcccctcactggggcctggttcacatcagaaatgagcccattaaaaacagatgctttctccatggatccgccccatcctcagtcagagtcccagcatccgccgcacctgcctgtcccttctcccttctcccctttattgtattttcactgaaggctgagaggagccagtctccacacggtgggccacttgcgattcccacagccccgtccgcactgcactgtttgtcttgttgctggaaactcaggtgactccttgtgcctgagggggcagctgaccccaggccaggagagcagggtgtgtgtggggaccagggagcggggctgtggggccacagggctttagttctccaggactgctggctctgtggtgactgctccccatccctgctgtcatccgcagccccctgcgccccgaggaaggaaggcggctggtggaggacgtcgcccgcctcctgcaggtgcccagcagygcgttcgctgacgtggagtaagtacggggccctrgggtttctgtttggctcctgttgctyggtcgcagagactgggtgggagggaaggagctgcgagcccatggctcttgttaattacatgagggaacctgtttagagaagtgaaaggtgatttcagcagctttggtaagttatttagaggcagtggaaaccagtgtttaaggggaaggatgaaaatctcctgaaggacagtgtcgctgcagccaagtgtcaaacctttggtgctgtaaccaccgaaggctctagaacattctgcacatgtcctatgccaatgtgtgggagcctctggagggcccaccccagagaacactgygcagcgttcatgagcacctgctgtggacacggccctgtccctggctgtcaggaaaatgcgctgcccttcggagacctggctttggatcccgagtctctgcagcttccatggcaggcatggccatggtctcagcgtgacctggtttagagagttgtgggcatgaggcatgcagggctggtgggtgagtacacacaggggcagcctcttacctgtctcacgacaagtgcttgaggaaccatgcgtgcatatgtgaagcttggagcagagatggctgagtgcagaagctgcaggagctcccacagcgcacagctgggtgtggagaggtcagagagaagagggagggtagagtgacatccacagaggacgtgagacaagaggccggcccgggctgtgtgcccacctgcctgtggaccgaggggtgcctgcctacacgtgttgttcactcactggccccttcacacagggtgacttcattcactcagtgactcttcacacaggtgacgtcattcactcactggctcccacagagtgacgtcattcactcactgactcttcacacaggggtgacatcattcactcactgtccccttcacataggggtgacgtcattcactcactgactctttacacgggtgacatcattcactcactggctccctcacacckgggtaacgtcattcactcactgacgcttcacacaggggtgatatcattcactcagtgactcatcacacaggggtgacgtcattcactcactgtctccctcacacaggggtgacatcactcactgaacctttcacacaggggtgacatcattcagacactcttcacatgggtgacgtcattcactcactggctcctacacgcagggtgatgtcattcattcactgagtcttcacataggggtgatgtcattcactcactggctccttcacacagggttgacgtcattcactcactggccccttcacacaggggtgatgtcattcactcactgtctctttcacatatggggtgacatcattcactcacagagtcttcacacaggggtgatgtcattcactcactgtctccttcacacaggggtgatgtcattcactcactgtctccttcacacaggggtgatgtcattcactcactgtctccttcacacaggggtgatgtcattcactcactgtctccttcactcaggagttatgtcattcactcactggctccttcacacaggggtgacatcattcactcactgagtcttcacacaggggtgatgtcattcactcactgtctctttcacacatggggtgatgtcattcactcactgtctccttcactcaggagtgatgtcattcactcactggctccttcacacaggggtgatgtcattcactcacggtctccttcacacaggggtgatgtcattcattcactgtctccttcacacagtggtgatgtcattcactcactgactcttcacacagggctgatgtcattcactcactggctccttcacacagggttgatgtcattcactcactggccccttcacacaggttgacctcgttcactcagtggctcctcacagcagatgctcactgggcacctgtggcaacctggcctcgcaccaggagctgggcatcccctttgagatacatgggccctgcctcaattctgccatttattaggaaaagacagaagagtgtatgggtcattagcatggagggcactaggggacatgcatgagaagcaccccagccagcctgggatcagaagtttctagaagtagaaatctgaaggacacatggaggcgtcccagagagagatgtgacatgcaactccacactgctcactgtggcccacaccgttcctagggtacagacatatgcaatgagcaggttcaaggaaatgtccatggacaggaaagatgtggagggacagggggctccatacatgccagggctgctggggtttccctgaaatggggtggtccggtgggcaggccaggtaggactgctcagcagggacagagaggccatttagggacccagtatgtagagtgagaggaccctacagggtgaacacagtgagatggtctgactagagctgagagagagcagccctgaggccacctggggaaggtaaaggagggagcaggtgcaaggcgggtgtggtggcaatgggagcacagagatccaggtgagggggggctatttgtggggctatagtgggtgagtgggctgtagagatccaggtgagaggtggcaggtgcatggggctttaattggcaggctcatgcagacatccaggtgagcaaagggtcacgtactcagggctgcagtgggcaggtggtttgcagagatccaggtaagagtgggaccaggcacagggtgaatgcagtaggaaggggctatgctgagatgcagatgttttttggggggcaggtgtgtgggcctgcagtaggcagcagaggtgcagagatccaggtgagggagggggcaggtgcatcaagttgcagtgggcaggggactttcccagatccatgtgagagagggggcaggtacatgggcctgctgtgggcagacggtgtgcagggatccatgtgtgagagggggcaggtgcagggcagatgcagatatccacatgaaagagggggcatgttcatgggctgctgtgggcaggggacacgagaagatgcaggtgagggaagagagcaggtacagcgtgactgcagtgggtggccactgggtgacttctgcctgggaagcaggatttgaagaattgtagaaaggcagcttcaaggatgagggtagatctgagtgcaaagtgtgtgttgatctayacagtgtgatgcctgcccatggaaacaggcaagtagggcctcaggcagaagtcctggtggcccctgggcagtcaagtgttttccctgtggctcacaatggggagggcctgttgttcccagagtggcctgggatgtttgggcatctggggttctggaggtggcgggtgggcaggggctgcagctgtttcccacctggtaggaaatacttcagtgttttaacttctgatgtgactgagggtactggaaatgtatggagtggctttcagcacaccagggacttaggaggggggagggtttgagggagcttcctaacaggtttgattgataggtttgtttcasgtacctggatgacttctaaggggtgctgtccaggtgacttaggggacagatctgggtaggtgtatatgacataaccttaatgtacagtggacagcaagatcccagtttctgatgggatcaggagatggaggtaagggaagagaaggggggcagcagcgatgtggggcacgtggacccttaggtgtatgtgagaacagagacaagtgtgcatgttggcaccaccttggtttcttgtgaggtagctcccagtcagtgttttgggttcctagggaagaaatattaactctagggaaaccacacaggacagatttcacagaggttgaaaatagaagaagctcccaagacctgaaagagctgagatgcttccaggatcttaaaatcttcctctttatgctgaaggagaattagataatctggttttatgggatcctggggaagtgacttttcctctctgggccatagttttatattttgaaaattagaggggtttgcctacttcatctttagtgattactcaaggattaatcttctgtgaacctgtgacctgggacactagtgaaaatcatgtaacaggcactctatcaccttcggggagcagggcacagatagtgtgacagggttatatccccaagggcagactccacaggtaggcgtttgtgtggagaggctcatttcatcagcccctggagacatcctctttatcagtgttttggatattcccaaagtggcacacttctgagcagtgataaacagtgagtcagaaaaggtggaaatagcttcttccagatgatacacggaggtgtgtgtgtggaggcagggagggagctaagaaagaagctggagccaaggatggaggtgatggtggagctttggaggaaactgcgctggagctgggagggagcagaggtggaggttgggatggaactcaagagagagggagatgagctgagatgaagctcagaaaggagctggagatgccacttgtaaggaataaggataaaaatgagatagagcagaaatggagctggggggaagctagagggagctgcggggaagctaggtggatggggctgggatggactgggatagagctaagatagatcagggaaggaactggaaatggagatgggatgaagctcagaaaaaaagctgagatgaatctgaggacagagcaggatggagctagaatggagcagtgatgatctaggatagagctgaatggagttggaatggagatggaaggagctgggaataaaacagaagagagatggggatggaattcagtggagctggatgaaggaggggatggaactggatggagctgggatggagcagtgatagagctgggtatacagtagtatggagatgagatggagtagtgatggagccgggtatagagtagtatggagatgggatgaagctgggtggagctgcaatggagctggatggggctgcatggcgtaagatggagctaggatggaaattgatggagataaggataaagcagggcatgcatctggatggaactggatggagatacaatggagatggatagagctgggatggatttgtggatggagatgaggtggagctgggatggaggtggatggagctccatggtctgggatagagttgatgaatctggatggaagtctatggagcttggttcagcttgggatggagtagggatggataggaatggagctggatggaagttcatggagctggggattattgaagccttggatgtacctggggtagagctgggatggaatctgctgtagctgagtggagatgggatggagctgggatgagggtgaagctagggtggagtttgatggagctcagtggagttgggatggagctgggatggagtttgacggagctgagcacagttgggatggagctaggatgaggatggagctcggatgcagttcagtgaaactgagtggaattgggatagagttgggatggagctgagggtggagttgggatggagtttgatggagctgagtggagttgggatggagctgagggtggagttgggatggagtttgatggagctgagtggagttgggatggagctgagggtgaagctagggtggagtttgatggagctgactggagttgagataaagctgaggatggagctgggatggagtatgatgacacttagtagggttgggaaggagctgaggatggagctgggatggagtttgatagagctgagtggagttgggaaggagctgagagtggagctgggatggagtttgatggagctgggatggagtttgatggagctgagtggagttctgatggagtttggataagggtggagctgggatggagtttgatggagctgtgtggacttgggatggagctgagggtggagctgggatggagtttgatggagctgagtagagttgggaaggagctgagggtggagctgggatggagtttgatggagctgtgtggagttgggatggagctgagggtggagctgggatggagtttgatggagctgagtggagttgggaaggagctgaggatggagctgggatggagtttgatggagctgagtggagttgggatagtgctgaggatggagctgcggttggtgctggttggagctgggatggattttgggatggagctgggatggttgtgatcatgggtggttgttggctcttcctcaagctctcctccactactgacaaggcctccatcagtcctgttctctctcttttctcccttctgttctcctctctgtccctgcctasgtgagccctatagtcttcatctcctttttcatcttgtgaggggccctgctgctgatcttggtgtcttactatttcctcatctatgacttttttatccatccacaaatccctgattttcacagcggtatctttgctcttaagttgtcttgattcttatgtgtcttccagggcctttctcaggagtctttgagcctgagattcacctgacctccattgtcttcatcstggccttcctcaggccttctgatgcctcagactgctctggggagggcatagtgaggaagcacagaaaagaaatctcaggcaggatgccctgatgctccattgccttaaatctgtctctaggccaggcacggtggctcatgcctgtaatcccagaactttgggaggctgaggcgggtggatcatgagctcaggagttcaggaccagcctggccaaaatggtgaaaccccatctctacttaaaaatacaaaaattagtcgggcatggtggcaggtgcctgtaatcccagctacttgggaggctgaggcagagaattgcttgaacccgggaggcagttgttgcagtgagctgagatcgcgccactgcactccagcctgggcaacagagcaagactccatctcaaaaaaaaaaaataataataatctgtctctaagaaccagaaggaaatgtgtccaggctgctaaccatcatgggctgagtgggatgatctgacttcatgggcattacaaagagcagtgtgctgtggcccccgacaccattggtgtccatcacatcaagtgggggcctgcactgacctggcacagagcaggacatgtaagaaggggaacactcatccctgcccctgagctgtttgaaacctggctcatgagacaaacaaatcggacagtgctagagaaggttctggaactgccagtgacctcagacattctgagtacaactcatgctagggaagtgaggctggagaggaagggaatctcctggggcccagagagtgggccctgcctcggacatcgctgctccatgggcacagccacgttagtccagaaagtgcagttttcctgatggtctttgagtctcacctgtgtgcagggctcttcgcgttctttttcctactgctgttattttaaggctttttacctcttactttgaactggaaggagccacctgccatcaagtgtcctgaatggttcaaactgcattcctttccacgaaggattccatcccaggcctgtatctttggcactatccctccctatggcccccaggaaggcgcctagttttaggactcaggaactcatcgtgggcccaggccatgcgcacagggaggatgaggccacaggtggtaagtgggagcctcacactgactgcagccaatgaccgcaggccctttgttctaggtgctcacgcctgcttctgctgtcagacagggacgggtgcatgtctggacacccaggccttactgggtcctgctgatggcttatttcagaaggaggggttccccatggactgatgccccagctcctgtcccgtcaggctccctgtctaggactcagctctgatgccgctgaggagcatgaggtactgtcctgggggtgtgtcctcccgggtctgcagtgccttccctgcacygtggcccccagaacattagccgtgtgctgtctttctccccagaccatcagctcctcagtgcctatctatgtcctgaacccggctcagtgactgcagagaagtgtgcaagtgcacacttgcatcttaagtgcaagtgtgattcaagcgtgatgcaatgagtccttgaacaacaaaggcctcatccctccaacacccgcaaagctgcaggcccatcccacacccccttctgcctctctccatatatcaaatacatggggcatgctctgtgattctgcagccctgggaaactcacctgttgctgccaaggcccacaattactgatgaacgtgtggaggtgtggatgcctccttagttaaaagtgagattgtcctcagggacatttgagggccatggaaaagaagcagcctgggtaccatgagaggtgcctccatgagcagcagggcrgcctggagccatgggagggaggaagctgttgcacccagacacataactgagataattgggcagagggcaggcagtcacaagaggtggctttggaataaagcatcctcgggccagctcgggatgcgtgcattgagtttaccatattttcctctggcaaagcccttctgtggtggctgtccagcacgtggaaggccgtggctcaggcgcacaggggctcagtgttttctgaaggttccctcctggccgccctgctgctgatggctgccatgcactgttagcatcatggctccagggtgaaggcgtgggctgagggctgcctggcacctgggctcagtgcctgccacatgggtccagtttgcgatctggggcttgggagaggaaccacttcatcctcaggacaggagaggggccccagggtcagctgcaagctccatggctgctcactgtgagcagatcctgggacctcagggcccaccgtggcgtagtgacgggcagagatgggcctgccgctgctcactgctttggccatctctgccctcccccagtaacatcccctgggagagggtgggccagaatgaagaagggaggagtggttggccacatggccaacagctggacggtcagggtggccaggggctttgctgtccacactgattggagcagacctgaggctgacgggtgcactactgtgctgggtgagattttcttaaataccaggtgggatttcttttaaagtctccatggctttcatggtgagctgggttttaaactcttttggtgcaatggaaggtgtgaggtctttctttgtatacagtgggattgtttgggctagatgactggaagaaggaatgagtttattctgctgattgtttcttttgctgtgcagaaactttttagtttaagtcccagctatttatcattgtttttgttgcatttgctattgggttctttgtcatgaagtctttgcctaagccaatgtctggaagagtttttccaatgcyatttcctagaaattttatggtttcaggtcttagatttaagtccttgatccatcttgagttgatttttggataaggggagagatgaggatccagttttattcttctacatgtggcttgccaattatcccagcaccatttttgamtagagtgtcctttccccactttgtttttgtttgctttrtcgaagatcagttggctgttaagtagttgagtttatttctgggttctctattctgttccattggtctgtgtgcctatttttataccagtaccatgctgttttggtgactatagccttatagaatagtttgaagtcaggtaatgtgatgcctccaggttgttctttttgcttagtcttgctttggctatgcaggctcttttttggttccatatgaattttaggattgtcttttctggttctgtgaagaatgatggtggtattttgatggggattggattgaatttgtagattgcttttggcagtacggtcattttcacaatattgattctacccatccatgagcatgggatgtgtttccatttgtttgcgtcatctgtgatttctttcagcagtatacagacaacccaaagagtgagaaaaaatcttcatgatctatatatccgacaaaagactaatatccagactctacaaagaactcacattagcaagaaacaaacagtcccatcaaacaatgggctaaagacatgaatagacaattcttgaaagaagatatacaaatggccaacaaacatatgaaaaaatgcccaacatcactaatgatcagggaaatgcaaatcaaaaccacaatgttataccaccttactcctgcaagattggatataatcaaaaaatcaaaaaacagtagatgctggtgtggatgtggtgaacagggaacacttctacactgctggtgggagtgcaaactagcacagccactatggaaaacagtgtggagattccttaaagaactaaaagaactaccatttgattcagcaatcccactgctgggtatctacctggaggacaagaagtcattatacgagaaagatatttgcacacacgtttatagcagcacaatttgcaattgcaaaaatatggaaccaacccaaatgcccatcaatcaatgagtagataaagaaatcgtggcrcacacacacacacacacacacacacacacacaccccatggaatactattcagccataaaaaggaatgaaataatggcattcacagcaagctggatggaactggagactattattctaaatgaagtaactcaggaatggaaaaccaaacatcatatgttctcactcataagtgggagctgagctatgaggatgtgaaggcttaagaatgacataaggactttggagactcagggaaaagggtggcaggagggtgcaccaaaatctcacacatcaccrttagagaacttactcatgtaactcaacactgcctgttcccaaaacctatggaaaataaaaataaataaagaaggaataagtttatttcatgaacacaatgatccttatgagggaggagtggggagaggaagtgaagcatgaccactgatgggatggggggaggaagaggaggcagccgggatgtgttggggggaggaaggggaggcagccgggatgtgttggggggaggaaggggaggcagccgggatgtggtgggaggaaggggaggcagccggtgatgtggggagaggaaggggaggcagccgggatgtttggggggnnnnnnnnnnnnnnnnnnnnnnnnnnnnnnnnnnnnnnnnnnnnnnnnnnnnnnnnnnnnnnnnnnnnnnnnnnnnnnnnnnnnnnnnnnnnnnnnnnnnnnnnnnnnnnnnnnnnnnnnnnnnnnnnnnnnnnnnnnnnnnnnnnnnnnnnnnnnnnnnnnnnnnnnnnnnnnnnnnnnnnnnnnnnnnnnnnnnnnnnnnnnnnnnnnnnnnnnnnnnnnnnnnnnnnnnnnnnnnnnnnnnnnnnnnnnnnnnnnnnnnnnnnnnnnnnnnnnnnnnnnnnnnnnnnnnnnnnnnnnnnnnnnnnnnnnnnnnnnnnnnnnnnnnnnnnnnnnnnnnnnnnnnnnnnnnnnnnnnnnnnnnnnnnnnnnnnnnnnnnnnnnnnnnnnnnnnnnnnnnnnnnnnnnnnnnnnnnnnnnnnnnnnnnnnnnnnnnnnnnnnnnnnnnnnnnnnnnnnnnnnnnnnnnnnnnnnnnnnnnnnnnnnnnnnnnnnnnnnnnnnnnnnnnnnnnnnnnnnnnnnnnnnnnnnnnnnnnnnnnnnnnnnnnnnnnnnnnnnnnnnnnnnnnnnnnnnnnnnnnnnnnnnnnnnnnnnnnnnnnnnnnnnnnnnnnnnnnnnnnnnnnnnnnnnnnnnnnnnnnnnnnnnnnnnnnnnnnnnnnnnnnnnnnnnnnnnnnnnnnnnnnnnnnnnnnnnnnnnnnnnnnnnnnnnnnnnnnnnnnnnnnnnnnnnnnnnnnnnnnnnnnnnnnnnnnnnnnnnnnnnnnnnnnnnnnnnnnnnnnnnnnnnnnnnnnnnnnnnnnnnnnnnnnnnnnnnnnnnnnnnnnnnnnnnnnnnnnnnnnnnnnnnnnnnnnnnnnnnnnnnnnnnnnnnnnnnnnnnnnnnnnnnnnnnnnnnnnnnnnnnnnnnnnnnnnnnnnnnnnnnnnnnnnnnnnnnnnnnnnnnnnnnnnnnnnnnnnnnnnnnnnnnnnnnnnnnnnnnnnnnnnnnnnnnnnnnnnnnnnnnnnnnnnnnnnnnnnnnnnnnnnnnnnnnnnnnnnnnnnnnnnnnnnnnnnnnnnnnnnnnnnnnnnnnnnnnnnnnnnnnnnnnnnnnnnnnnnnnnnnnnnnnnnnnnnnnnnnnnnnnnnnnnnnnnnnnnnnnnnnnnnnnnnnnnnnnnnnnnnnnnnnnnnnnnnnnnnnnnnnnnnnnnnnnnnnnnnnnnnnnnnnnnnnnnnnnnnnnnnnnnnnnnnnnnnnnnnnnnnnnnnnnnnnnnnnnnnnnnnnnnnnnnnnnnnnnnnnnnnnnnnnnnnnnnnnnnnnnnnnnnnnnnnnnnnnnnnnnnnnnnnnnnnnnnnnnnnnnnnnnnnnnnnnnnnnnnnnnnnnnnnnnnnnnnnnnnnnnnnnnnnnnnnnnnnnnnnnnnnnnnnnnnnnnnnnnnnnnnnnnnnnnnnnnnnnnnnnnnnnnnnnnnnnnnnnnnnnnnnnnnnnnnnnnnnnnnnnnnnnnnnnnnnnnnnnnnnnnnnnnnnnnnnnnnnnnnnnnnnnnnnnnnnnnnnnnnnnnnnnnnnnnnnnnnnnnnnnnnnnnnnnnnnnnnnnnnnnnnnnnnnnnnnnnnnnnnnnnnnnnnnnnnnnnnnnnnnnnnnnnnnnnnnnnnnnnnnnnnnnnnnnnnnnnnnnnnnnnnnnnnnnnnnnnnnnnnnnnnnnnnnnnnnnnnnnnnnnnnnnnnnnnnnnnnnnnnnnnnnnnnnnnnnnnnnnnnnnnnnnnnnnnnnnnnnnnnnnnnnnnnnnnnnnnnnnnnnnnnnnnnnnnnnnnnnnnnnnnnnnnnnnnnnnnnnnnnnnnnnnnnnnnnnnnnnnnnnnnnnnnnnnnnntgttgggggaggaaggggaggcagccgggatgtgttggggggaggaaggggaggcagccgggatgtgttggggggaggaaggggaggcagccgggatgcggaacccaggaatgaggccagagaagaagtgggtcttcaaggctgagaagcccggctcccctcaaggacccaggaacgctgcaccccgcactgtcaccttctaccatcttctccggccctccccgcggccccgttccccgtcccccactgcttccttgctttctcgctttctccccagctcctcggtggtcacgctttgcttcatgtctcccactcctctcccataaggagcgtcccgcgttcacgagataaacgtccttcttcttccagtccccgagcccaagcaaccccattcaccttcacagagtctcagcaaaatggtgggactggcagatgccaggccggggcgggcgagggaggcgtgtgcctcggggagcctctggtttcacagagcagctgggcctcgcccgtgcctgctccctgcccctggccctcctggccaccgccttcgctgtcggaagacggattctgagcacggacggcttctccgcattccgggagcagggctgggctttgccaggctcagtcctgggtaagcgtcaccctcgggcatctcccgccttaggacactggcggccccctctttcctacagagtcaaacctgagtcccgccgcccgtccctcggagccttcgggaatctggacctctccacctcctccccagggagcccccccggtggcctcacccgcaggatcctttgcgggtcccctgcccacattgcggagctgaagcctgattcttgctgcgtccagcgcttctccgaggtccccagtcctggccaggcagaggctgccccacgctgggtcttgagttctggtgcctgcgtgcgtgtgtgctcatgtgcaggggaccacgcaagccttacttccacgtcctgtgcctcacccgggcccagcagccacgggcacacacttggcaaatgcaccggctcgagggacggacgggggtgtgggctgtgcctcgttggtgtctcgaggggagcagctctgacaggcgggagacacggccacgcggtgctgcctgtcagagcatgttctgggagctgctcattgttccgggaaaggaaaagaggcggacaggatgcgcaagctgtcactctcagactctcctgcggttttgtggaagtgctagttatgctgaatatgttttgttagtggttatgtagctgtcacataaatcccattatttcttatgacatcattagagaccattaaaactgcattagcatgtgatgtaattatgccagcagaccggcagtgaccgcagccgggtttttacgacgtgattgtggctgtctgcggcggcggtgatcgatgccaggccgccttccgcggaatctcggggaggtgggcagtgctcctgggaaaaaggatgccaaagacacattcccacgagcccctgagtccacagtgagacgggctctgtgacagttctcttccagatggcttcggtggagctcccacatcagccacgaggaccgccggggcattcggggcacgcagcctaattctgtgatcaatcttcatgtgctctcctggtgggagaagcgtttactttctcatctgtgtgatttactggattgatgaatacggtgttattaccgaagaggcagcagtgggaattctcaaccctgatgcttcttgttggggtcttctctgtgcacggggcgcgggaggtgcctgtgcctgctcgatcctgtgacaaccccagtgctgcccgggcccctccacctccttccccagtgtctgcccctctcccaccctgccagtgggagaagtccctggggtttgccgggaaacttctggaaagtatgtttcagtttccgggggcagagttgtgattgttttgcccctagtcttgtccccatgcataggggatttacaaagatgttgtaggcagcaggaatcctgtgaggggtgagaatggtccttcattccctgggttggctctctggttttccctgtggcctcgatgactataaagccctggataattttgtctacacatcagggcagtgcagattaaccactgcagcgacagtgctgtgcgttagtaatatcactcaaagccaagagcccccgcagtgagaaactcccaggagccccaggggagggtctgggtaaatggcatttgcatctggatgtggtgtatccaccacctgcagactccrgccctcacgggcaatgttgctacctgtttcacctgtgttctggatttgccaagtgaggaaggtggggaatggggcctcatgttatgtaactctccttcccaaacggagcccaggcttcgtcttcagtgccctgtctgaatattacaagcagttgcaaaggtgcaagctagtgtctcgagacagtgacatgaggttttcctggaaataaggaatgtcaaggaaatgtcacagtacgtcaaaactccccgtcccgtctttaagatgagacaacaagggaagrccactgtggatttgcaaataataattctgtttgagtgaaaggtggcatttctcaggttaagtgaatcccatgatttgattaaagatatttgtgtttaaaatattggtggagccttgtttcctagtatgaaatgatatgaccatttaggaggagagcagtttccttattttcctgagcctcagtttccccacaaggatggaggtggcctgggcatgtggctgagacccggctcttagaggccccacacatggttcatgctttgctggtaccatcttgagactcttacaattcttcaacaaagggccccacaaattatgtatacggctgtgaggccatgacagggttggagagactctaggaaaaactagaataacgtctgctgtggaggtttgcaatacatgttagctggacaattgcgctatttcattgctgttaggaaaaaaaacactctaatttctactgttaatggattcagattggcaagaagaacccattcttttctctagacttttcaatgcacttcaagtgtgaagcattgggtaaatgctggatttgggtactggacaccaggtagtgaagagtttcccaggcagttctgagttttcttgtaaaggcactttcatccataggacttgaatcttttatctcctggcctggtgcggcggctcacgcctgtaatcccagtactttgggggctgaactgggaggatcactggagaccaggagttttgagaccagccagggcaacatagcaagacctcgtctctgcaaaaccagaaccagaaagtatacactcctacgctccttgaaggcagggcctcrgtctgtattgctcaatcatgcgtcatcagtgactagagtgtttctggcccataacaggggcttatttgttgaatgagtgaatgaatgattccacgaaagaatgggcagactgaattcaaaggcacatgggtttgactctgtttttctcaacttgctgtgaggccctgggcagattactgaagccacctggcctcagtgtgctcctccatggagtagagacgataatgtctacatcagagttgtagaattaaatgccctgcgtatgcagatacttaacaccaaataaagggtagctttccagatacattattaaagtaataaaatgtctaagccaagaaatatgtaaacacatgaacaagttagatttatatagaaatgacaccaaacactgtggtaaaatatgcattttacttatgacctacaccgtcaatactagataccctgcttggcgttattcttatttttctcaccaggaccaaataaaaatcacttcactcttccgaatgtgtctctccagtcagagacgttgcgcatgagctgattgcaggaggctttggggcagatgggcggggcaggttattcaggactcacctcctgcaggaaaggctgagacctgcaacccagggcagggaggaatataaacctgccccagttacaggacccagcggctcctcccaccacggatgctggcccatgagtgtgcgttacacttcatttgggattgcaaactggagttgtttgaaggctggcagttgccttcgggagttagcagcctgcgtgtccagagaaacaaaagtaaaacaagaaacaaaaccagagtgagccacagtgcccaggagaccctgagggatggtggggactgcgcagtggagccctcaggaacactcagggggaggagttctcacctttcctgcctgtcctacagcaccgaaggctgtggccaagctgctgaggcttcgggaaaaagcctgggtcctaattcttgggtgaatgcttctacttctaaatgttagtcactaataattcagtcatgtgtttgtgtagctcattaatccttaagcatcatgagagcgaagctgcaatagaaagcacagatgggggccgggagcagtggctcatgcctgtaatcccagcagtttgggaggccgaggtgggcggatcacaaggtctggagttcgagaccagcctggccaacatagtgaaacgccatctctattttaaaaaaaaaattagctgagcatggtggcaggtgcctgtaatcccagctactcgggaggctgaggcaggagaatcacttgaacccgggagtcagaggttgcagtgagccgagatcacgccattgcactgcagcctgggtgacagtgcgagactccgtctgaaaacaaaaacaaaaacaaaacaaaaaaaacacagatggggtggccctggtccttcgrgaatggcgagcgttctgctgctcctggtgagatccggcccacccctgtgctgggggaacaagggtcttctcttgggactggtcatgccacccagcaggtgtaacaggaaagcagcctgcagtagaacttcaaaggaggcaaatgcttctaaagttcaaaggcaaagcatacatactgaacaatctgttttcttccaaatactccatgagaaaagtaagcggcaagacattccctggcacagaaaggatttcccaaatcccatgtaatggcaaagtaattgcaaagaagatacaatctgcacagtgatgcagttgctcaatgctttaagaaaataaagcatcattaataattatgttttcattaaggcttgcatgatgttaaattatcttgcaataactgtgtgtgtctttgtttcctcatacattcaaataagaattggttctctcttcttcctcctttgtaagctcttaggctagatattttgggaagttattgcctcatgtacgagaggcaggaatacacaattgtgcaggaaatgtggtaaaattaaaagtgtgtgtaaggaaagtaggtatgcattatgctatccacgtggaattccggagttttatgttcccgatgtctcctctgtaagaagacatagctggaatgaggcatgcaaagagaattctgtagcagccagacgtgagctcatttttttattggttttctgtcggtagcttggattagcccagcaccaagctgtgggcttgcctagagtgagggacgccagtgaacaaggaacaagactggaggaggcaagttatcatcaggaacaattcagggagtaaaagcacaaacagtgtgggggtcggtccagcgacagagtcaggaaaggacagtggtgcaggcctacctgtgggtccacagtgtgggggtcggtccagcggcagagtcaggaaaggacggtgcaggcctgcgtgtgggtctacagtgtgggggtcggtccagcggcagagtcaggaaaggacggtgcaggcctgcgtgtgggtctacagtgtgggggtcggtccagcggcagagtcaggaaaggacagaggtgcaggcctgagtgtgggtctatggtgtgggggtcggtccagcggcagagtcaggaaaggacagaggtgcaggcctgcgtgtgggtctcacacttatactcgtgcctcgcagaaggctctcagccaagaacgccgaagttgtgattctagtggtggcattgatattagaattggactatttggagctagcacctaaaactacaagggtttcaacttattcatctataaaatagcgattgccaaatgagttgccttaggtcaaattttgtggttgttactgagcaccacagcagcgtgctctcttggtttgcgcccacctactcaaggccagacacagggctggtttcttggaagttcccctgtgcctctacctcgaggctgaggggctggctttagggagcccctaaaacatgtactgtgtgtagtgagctcttccaggttttacctggcctcaaattatgttcagccagatatagtaagtctcttaaatcattatgattttgtttgataattttgagacctttattagcactgtgtttctctgaacataatactgactaagaaacagaatgagcaattcactaaatgtatagcccacaagatgggaaaggtttaatgcaaaatgattcttaagctataaacagtattttgagaaagtgtctaattatgtttgaattaatataagcaataaatatatacatatctctatccaccaaaccacccacctatcaatttttcatccatccatccgtctacctccccatccatccagccagccatccacccatatatctatccacttatccacctctctacccatccatccatccttctacccacccacccacccatctatccatccatccacccatcctccctcccacccactcacctacatatatatacacacacacatatatgtatatatatgcacatgtatatatgtatgcatatatatacatatatgtgtgtatatatatatatgcannnnnnnnnnnnnnnnnnnnnnnnnnnnnnnnnnnnnnnnnnnnnnnnnnnnnnnnnnnnnnnnnnnnnnnnnnnnnnnnnnnnnnnnnnnnnnnnnnnnnnnnnnnnnnnnnnnnnnnnnnnnnnnnnnnnnnnnnnnnnnnnnnnnnnnnnnnnnnnnnnnnnnnnnnnnnnnnnnnnnnnnnnnnnnnnnnnnnnnnnnnnnnnnnnnnnnnnnnnnnnnnnnnnnnnnnnnnnnnnnnnnnnnnnnnnnnnnnnnnnnnnnnnnnnnnnnnnnnnnnnnnnnnnnnnnnnnnnnnnnnnnnnnnnnnnnnnnnnnnnnnnnnnnnnnnnnnnnnnnnnnnnnnnnnnnnnnnnnnnnnnnnnnnnnnnnnnnnnnnnnnnnnnnnnnnnnnnnnnnnnnnnnnnnnnnnnnnnnnnnnnnnnnnnnnnnnnnnnnnnnnnnnnnnnnnnnnnnnnnnnnnnnnnnnnnnnnnnnnnnnnnnnnnnnnnnnnnnnnnnnnnnnnnnnnnnnnnnnnnnnnnnnnnnnnnnnnnnnnnncaaccatctctctactcatccatctatcacctatcccccacccccccatctcgctacccatccatctatcacctttccctcacccacccacccaaccatctctctacccatccatctatcacctatccctcactcacccacccacccatctctctacccatccatcacctatccctcacccatccactcacccaaccatctctctacccatccatctatcacctatccttcacccacccaaccatctctctacccatccatcacctatctttcacccacccacccaaccatctctctgctcatctatctatcacctgtccctcacccatccacccacccaaccaaccatctctctacccatccatcacctatctctcacccacccacccactcacccaaccatctctctacccatccatctatcacctatccctcacgcacccatctattcatgttatgggcttcactccaaatccaggtgtcaaatagataaagcacaggtcagtctgtcaagccagcagagagcatgctagtaaaataaacaaacaaaaaacagtctacagaagttttgtttttttcatttctaaataactttcaagaaaattcaccagttgaaaagagaagcatttacttttatgttggttgtaaagcatcaacattaaatgattaactttaaaactatatttgttgccatatatgccttggctatcttctttttatccacaaaaagtcaagggaatctagtacctgaggcctgtctttatttaaacggactacaaacttgttaactactgcttaggcagtgtctattcagaaaactgtagtcaaatgtgttacatttattgtagcccttaaaggttgacttgatacaaataagcctgtgttatgtatcgactgtatagtcgttactatacagaaataacaacccccagactaacccaaccaaatagaagcctcggttcttatttaaaaccatttccgaaacatggaagcttttgtcagagatttgttcatcttcttcattctcaaccggacggttggtctaagaacagatggagctcagtgttttctttcctgtggttaaagtgtcatgccctgaaaactaatattcagaaaatcactttgagatatatgattgctaagacaacaaatattagtacatcagtatattgatgttctaaaggcagataattatatgtatttttaaattatttcactcataaaagtaggggaaaaagagatttccaaatagtcctcagttaagaaaaggccttttacgcagaactcttacactcaacagtctggttgatggagggctggtatgtttgtctcataagtcttgagtgataggagtatcctagaacacaagcaataaaatcagtgttaaaatgctagatgtcacttctcttctttgttggcatgttttatgaccatcaaaagaaatgagcaattatcaatatatagtaaactatcaagtggaaccactgagtgataaagaactcaggaataaatggaatgatatttaaaatagaggtaactatagctaaaattacagtgatgaaatgatctcttatctatgtacaacatatatggtttccttattttggttaaaggtagttttaagtcagtgaattctgtagaatctcagtgatatattttttcatgttatttccagcccaattgggagatgactcctagcggcaataaatagcttttgtttctcctaatatattcttcataggacccatgtgaacacattgttcgagtatcacacctctgagggctctaggcagcaggtgtgtgtgaagactccctctttcatcaggggaggaaggtttgtgtgaagactccctctttcatcaggggaggaaggtktgtgwgaagactccctccttcatcaggggaggaaggtttgtgtgaagactccctccttcgtcaggggaggaagcgtttgcatctgagtgggcagcattcctttttggcatttcttccaccctaaatagragtcacctttcacggtaagtgaatttgactgtcaaaaggtggatggttctcccaggaacagtgactcagaaactcctcctgctcttgcatcagacgcttcttaccrtagatgtgcctggcacgaccatcgggacgacactttcaagatctaccctgacgtggccatttacagattcctcatgagatcttcactgcacggtccagggtcgggaaagagacagtcccctcccttgtatcaaccacgtcattcccgaaggaaagcaaccaggctccctgagaaagcagtacagcgtgcggggactgtgtgaacccacacaagccatagtcaatttagagagtggattttatggaagaatttggaggaggagcagacccctcctgactgagcagggcacagactgacagctttggttcagagggaaccctgtcgcatgtcagctatcctgcccgatcctccaatgccctgcaatgtttgtcttgttcccccgattttgcagggtaaataatgtaatgtgcaaaatcgccccgcgaggaagtggcggttaaacaaacaattggatctcaagccttgtaagctccagtgctcccatcctctctacagtataaaattgaaaaatgtgaagaagataataaggttattgatgtgtgtgaaagcgcttcaacacagatgctaggcagtcgatgatcctgttcattcgcagattctgtatttgcaaattaatttgtaacccccaaatcaatgcttatgccaaagtcattcctgcacacacacacagccataaagttcaggttgcctgacatgcctgtgctcaggtgggagaggacagctccgccttctcgtttcagctcatactgtaaaacaaggctcctctttatggtctattgagtgccacattttccacattttttgtgcttttcgttggtggttttgttgtttaaatggccccagcacagtgctgagtgctgactggtgttcctagtgttgtaactggctcaagtccagctgtttgccactcagaggccgaaaacatgagagtgaggtgtgggcagaggaaagcagttattaatcaaacgctggcagctggggaatggccaggctcatgcctttaacagaccattccccctttgtggctgagtgaggggtttaaggaggaaaaggcatggagctgtgtggagtggtgcaggcggacgccaggctgtgtgtgtgttctgatggttatctcatcgtgcagaggcctggtttctatcattgtggcttcagcctgggagcggtgggctacctgttcctaactccccctcagcggaggattctgcagctcagtctctctgcctgttctgtttgaaaattggcccctggaatttctaagcaggtctgtaattagataggtgagcactgtgtaaggagcgcctggtggagaagggagccacgaagaatttcacagtatgcttcaaagccaaagcaggaatgggaaggaagtgctctgtgtgtgaggccgggacacgtggttacaatgtgcctgacggagaaaacacccatgtggatgggcgtcgtgtgtgtggatgggcgtcgtgtatgtggatgggcgtcatgggtgtggatgggcatgtgtggatgggcgtcgtgggtgtggatgggcgtcgtaggtgtggatgggcgtcrtgggtgtggatgggygtcatgggtgtggatgggcatcgtgggtgtggatgggcatgtgtggatgggcgtcgtgggtgtggatgggcgtcatgggtgtggatgggcatgtgtggatgggtgtcgtgggtgtggatgggcgtcgtgggtgtggatgggtatctgtgtggatgggtgtcatgggtgtggatgggcgtcgtgggtgtggatgggtatctgtgtggatgggcgtcgagggtgtggatgggcgtcgtgggtgtggatgggtatctggatgggcgtcgagggtgtggatgggcgtggtgggtgtggatgggcgtcatgggtgtggatgggcatctgtgtggatgggcgtcatgcggtgtggatgggcgtcgtgggtgtggatgggtgtcggagtgtatgggcatccgtgtggatgggcgtcgtgggtgtggatgggcgtcatgggtgtggatgggcgtcgtgggtgtggatgggcatgtgtggatgggcgtcgtgggtgtggatgggcgtcatgggtgtggatgggcatgtgtgaatgggcgtcgtgggtgtggatgggcgtcgtgggtgtggatgggtatctgtgtggatgggtgtcatgggtgtggatgggtgtcgtgggtgtggatggctttctgtgtcgctgggcgccaatggtgtggttcctcctccccggcgccgctggctgtctgggttggcctcaaggctgtggctgggcctgggctgtgtctgcccattctctctgtgcggccctcctcccccggctggtcttggggctgcgcgggcttgccgtcccctgctgttggcgctcgcgcgctgctctcctggctgggccctcggttggctctctttgtccctctttcctgtgcttgcctgcgtccctgctgtccgttggcccccctgccggctgctggtgcctccatggccctcgtgtcttgttgcttgggcgccttccgtgtgcggttgtttccccctgcgttgctctccccgcccctgtccggttgcccctggctcctcccgctggggcgtgctggtccttgcggcctgcggccccgctctgggccccgtgggggtggcggtttcgcggcctcgccgtgcgggcggctgggcgcgtgggtcgccggaaaacagagtaaaaaaaaaaaaaannnnnnnnnnnnnnnnnnnnnnnnnnnnnnnnnnnnnnnnnnnnnnnnnnnnnnnnnnnnnnnnnnnnnnnnnnnnnnnnnnnnnnnnnnnnnnnnnnnnnnnnnnnnnnnnnnnnnnnnnnnnnnnnnnnnnnnnnnnnnnnnnnnnnnnnnnnnnnnnnnnnnnnnnnnnnnnnnnntcgccgccgccccgcgctcggccccggatggtccttcccgtgcttggttcttctgcgtttgtcttgcgcctcatcgggtttgcttgcgtgtcgctggtcgtggctctccccggcccgcttggcttcctgccttggttggtcctcttgggtgtgattgtgcatgtgtgaatgggcttcgcgggcgcggttggccttcgtgcgggtggatgggtatcttgtgtggatgtgtgtcatcggtgtggatgggtgtcgtgtgtgtggatgggtatctgtgtgcaggggcctcaagcgtgtggatgcgcgtcgtgggtgtggatgggtatttggatgggcatcgagcgtgtggataggtgtggtgggcgtggatgggcgtcatgggtgtggatgggtgtggtgggtgtggatgggcatctgtgtggatgggcgtcatggctgtggatgggtgtcgtgggtgtggatgggcgtcgtgggtgtggatgggtgtcggagtgtatgggcatccgtgtggatgggcgtcgtgggtgtggatgggcgtcgtgggtgtggatgggcgtcgagggtgtggatgggcgtggtgggtgtggatgggcatcgaggatgtggatgggcatcatgggtgtggatgggcatcaaggatgtggatgggcatcgtgggtgtggatgggcattgtaggagtgtatgggcatccgtgtggatgggcatcgtgggtgtggatgagtgtcggagtgtatgggcatctgtgtggatgggcatcgtgggtgtggatgagtgtcgtgggtgtggatgggcgtggtgggtgtggatgggcgtcgtgggtgtggatgggcgtcgaggatgtggatgagtgtcgtgggtgtggatgggcgtcctgggtgttttctccccgagagctgtaatattaggtgcagtacttgctcctaagagactctgcagggctctaggcatctttgttttactttttatttcctgattagtacagaaattccccttttgatgctggcaatatgcacatgggatttattcaattttccccaaatgtctaaagagacagaaagctgaacaagatggcagagacaaccaaggctccctggttagaaagaagttggtgggaaggctgacctcactccctacccagaagcctctcacctggaccacacagcactcagccatctgccacctgcacagcagacgtggcgggcggggtggggggtggtgggtggggttggtaacaaatgccagggcaagttcttcttgtggggagggatctctgctgctgatggtgctgggggcagagccagcagctcagctctggagcccccagtgttgcccctgtttactgcagacccgctgggcctggccaccagagtttattgaaaaccagggtctcctaggccaaagcaagtccaagaggacctgtgggccttgccacactcgacagctgagtaaactgaggcccagcggaagggcccaggagggccacagaacagtgactcatggagttagacctgtagtggggcctcgggatagagacttcttcccacgtcagagcagccactatgggttttagggaagagcctgcacgtattcaagttagggaaggttatgcagttggggtcacgttaccgaccctctgagtctcctccggagacagctcctcatgccctgtcctcccacagggttcctgagagcacaagggccagagccagggctcagtgcaccgtgaccgcaggcacctgggtctcgctgggcctgacggcgacggtcactgggtgctcaccgcctgcgagatgtaccccgagggtgtcaggagcactccctggtgatgaccacagccccacgcaatggtgacgctcggcatgcgtgcaagaaaggacacgggctgtgtgggcctctcctgcggcccccacgtgaaatacggggccatgkatgggtcacatgcttcttcatagcataggggtctgggtctttggactctgaggaaccaagaacctcctcacagcctttagagaaaactttcagcacgtgagggaaaaattaggtttaggatattccagtcccatctgtcagggaatcttcagatgtggtcgagattacagtttcacagatgccgtgtgtaagcttgaagccctgtggctgagctctctgtcctcagcrttgtttcgggggtacatgagtgctgcttgtgttaatgaggactttctcttaattttagaaaaccattcaaccaaaatgttgaaccggtcacaaatatgaattgatcacctcctgcgtgggtgaggccgtggcagaaatcatcatgcatgcytcaaagagcccatcctgtgctcgggaagaaggaaaacatctataaaacgtctggtgtgccatttgagcactaaatatcaggcactcagggcccttctggaagactgtggagacagggagaatcrgccactctcacagtgctcactcgggagtagggctttgagagggggtagaactcagcactcatgagcgagtggaacatcgttggcaggagagctgcagtccagggagggagtggcctcctcctttctgagggcccatagtggggaccagcagagggcccagccgaggcaccgtagacaggcctggggcctgggctcgagaagacaccagctcctgctccatggtcatccctggaggcggcttccaaggacattttgcatgcagtagagctggacgcaggaagtcactcagctctgctgtgacagggcacaggcttggactagaagatcacagtgggaaccaagaggcagtggtggacatggtgcattttccaagggtttccgcagaatttggtgactagctggatattcctggcataaggaagccaaagggaatatycgtaaggttagaatgctgtttgctcctcagagcaggcgctgattcaagggagaccttgttgagttcaaagtgatgctaagacgtccacatggaatattcagccatggtgttaggatggtaattgtgctgcctcgtaatggcacgacagtccccttcaccaagggcttgcacatggaggagctggccctggctgggagaatgagcaaaaatcccaaggaggaagaccagaggttgggactgaggtatcatgagcagagatrtctgaatcaaaaatacatgtgaggttgaaaggattttgggtgcaaaatccacagcctgggtgtcatatgctgccttgggatgagcctgtggtggagggtgtgtggctgcagtggggacagcaagggaccctgggctacatggtacccagtttcacagcttagatgtcagtgcaggcacctcccagggaccaggaagcaacagtcttagctgccctctcccacctaaattgggtcctcttcgcatttcctgtctgttccagggatttacttcttagaagacatttaaggggtctgttccaggaagagctatctatggctgtcatctgtggacatggggtcagtctgtctgtctttgggaatggaccctggattcctaattcattttgagatggctgtaggcacaataatcagtttctactgcatatggggtcttcagatgaattaaatggtttaaaaagtaaggtattttttcaaaattgtggttgacatagcatttaaaaagctttgaacaattttgataattcctgtctagcaattccctgccagttgtttttatacagagtagttcttaatgactttggtagttttttaaatggttcctgtcaaaagagtttaaaaaatactagtctctttcctctctgctctagattcatacatctcccttggggaccaaagactaaaatctatttcaataacaacttttctttttctctagcaagaatatctgcttgctgttgctgggttcagaggttgatgtgaattttttaggatagcatattacactgtgatgtgtgttttggaaaagcaaagcccaaaaacggaattcctggcaaatggaaacaaaggtcatggtgtgaaggaaaaccgacgtccagtggagtcgacgcctggagccacagcggccttggatgtttgcgtttttaaaaacacaccagtgttttccatgtcgttttcagaaaagcggtgtggcgcgtagacttcgttatgaacttattttaaattatcccttccagggttctcggaccagcagtgaccttcaaagtgagcgccaatgtccaaaacgtgaccactgaggatgtggagaaggccacaggtgaggctgtttccrcacacacgtacacgcacacacacgtgtgtgcacacacacacgcacgcaaacacgcacatgcacagccagggcagagagagactcacactacccacatggggcaacccagaggaaggtctcggtttccgtggaaatctggtgtgcagtgaggggacgaggggcagtcacagggcaatgtggctrtccgtgggcaccatctgggatttcactgtgtggagagggactgggctgccctgatgtgtggaactggctcagatagaaggcaggagacacagggctgcaagtgaccgagaacaaatccggcttttggaaaagcaagatttggtgtttgtagtaatcccagtgtgtgcagagcacgtgcaattttgctytgaggtttttcattttgtaccagaccaggagcacacaccggccctgctcccgactgcggtgggcagagacaccacaaagtatctgggaggtttcagtaaaaaccggccgacttccagacggtttcactgtttagagcccagggttctgggcattgcgaatcacacatttttgagatgtacttacagatagagcttgagtaatctttgttatatgattaataattgtcattgagtgaaaaacacaaagctttactctccagagtcttgaagaacagaatgggatggtggacacaatgttgcattttcctcaacctgccttttttttttttttttaaacttgttgaaaactcttgtagagtgtattgtttaatcttcctgcctagtaagaaaaatacaggaagcataacagaaccttagcctgatggttttcagtgcattagggccattccgcaggcagggcgctcccgttccgtatcattgataagacaggacggaacacactgacccagccacagcgggaaatgacacttggttttagccagtcctttatattgctaaatctatgaacttgtctttttttttttttttttttgcttaaatttgtgtctttttttcccagtgtaaaatgcagcaaaatactctggtttatttcgggatttcaatacttagttctcgttgattgaggcgtcactgtactggcaccctgtaaacttgaagtttctttttccagtgagagtaatcaaggtgtgaagtagccaccatgttctaagggatggagcgaattgctggtcctatctgttttggctgctgcgggttttgcttatgggatatcctcgtgccctcagtaactcctttgctcaaggtggtgatttagggggctgagaatttgtggttgaaatacagtgctttgcaaagttgtactaaacttctgcagtctgatttaaggtttgtggagacttgagtccccagtctcactttgttgccatactttgctgtgaggcttgtggagctggggtacaactcggaaaagcagcccagcatcctcactccagctgggcggtccagtgcggtcccagcatgaaaagtcagtgggatccataccaaacactcccacgcaagaggaatggggggtcccaacaacggcttcagtgcctcgtggctgccagagctccctccctccatggcatctgtttcgcttgctctagttccctgtcagaagtgattattggagatatttaagaccaaatccgtgatcaggtattatgcagaaatgcattgataattatcccatgattggcagtttctccagtactggggagcaatgccactggaattaggtttgcaggacctcaaggatgctaggaatggcaatcttgttatatttttaaaaatcataacaatatactcacagacaaggacctttgatttattttatggctctctagagaaaatgaggttgattatttgaaagctagtttctcagtcatttcaaatgtgttcatgttatttatcgaagtgctgcaccaagggggagccacataggaaatgtacatttgagtctcatattgacaactttctaaacacctgaatttgctaacttgcaccagtgcctccatgttaactcctgtggctgtgtgagtcagaatgtttcttgcttcttgaacgtgtgcaaaattgtttacattcatgcatgatttttaaagaattattttgaataattctatggtgtcatgaacgtgcctgatgctatataagaaacagattggccgggtgcagtggctcacacctgtaaacccagcattttaggaggccaaggtgggcgggtcacttgaggttgggagttcaagaccagactgaccaatatggtgaaaccccatctctactaaaaatacaaaaaaattagctgggtgtggtggctcaaacctcagctactcgggaggctgaggtgggagaatcacttaaacccaagaggcagaggttgcagtgagccaagattgcatcactggactccagcctgggccacagagggagaccctgtctcacaaacaaacaaacaaacaaaaaaaacccaagagattataaaaaagaattttgtgactgtgaagatcttgcaggtaggcagtggacatgcccatgtgtggtgactggcccatcggcctcaggagagcgcttagcacggttggtgactggtgactcgcccattggccttgggagagtgcttagcacagtgactggcccatcagcctcgggagagcgcttagcacggtgactggcccattggccttgggagagtgcttagcacggtgaagaggagcctcttactgagtttcaggtgagacgtagacaggctgacatgatagcagggaagaatttcaaattcaaaaggagtttcttatggtttgtgttttaaaagatgatgtggaatcctaatagtgtcatcacaaacgccctgtggtgatgggcggacacctatggaaggacgtgtggtggtgcctgtgttaccaacatacagaactcaagagcctgctgttgaaattactgggagtgctgggtgctgcctgcacctgccacctgccagctgcctggaagcccaatggctgctggcgtctggttccctcaagggcctgaggacctgaggctgctgttattaatgcggggagatcaccctggcggtagaattcaaagggcattcattttgctaattttatacaaaatgatacaaaacctaatgaataggcgtgtagttaatcccacattagtccccatcaaacgtcacgtggtattgatgccgaatgagaagggcagctgctgttcattactcagcgtctcctctttatcgtaggcaatgctttcccgggaattctgctaatttatgaccttgggtatgagcacagggtattagtgaatattaaaaataagtgggttttgctcaaggaggcacttactctaccacaaagtacatagaaatgactggtagctacgtttaatctccgtggctcagtcacatagttgaactggcagaagagaaaaatcctttttattcttcatttccttggtagtttcttcttaaatagtatatttctgatcaatttttgtattgctcctttcaaagaaaaggaaattcatcatcctttagaaactgtttgcttttgctggctcccagtctgcagagaccctcacccggtggcctgtggggctgcctgtggtttatgagcttattgccaggaatcccctcccatgctcggccgtttccttcaggccgagttcaggctgtttcttcaaacattccctctcgggcgccacggagggtgtgtctctggcactcagccctgaatggtggggtgaggctcatggggggctcctgtcctgagcagtttccccctttgacctcagcatcctccacctgacagcctctaagacacggcattcagctgccattgtttctttcagcctgttggagaggcgccccgtgtcatttcagtagcggcgcctctgtattcagaggtacggtgactttccgtgacgtcctcctgcttctgcctgttcggcatctttgtgaagctggtgagtgtcagaacagggtcgtgtctgctgtgctgctgtctgtgtttcacgtctcatatgtagcgggtccacatggaggaagaggctcccctcctctcttgtgagcctctcttgaatcccggctcagaactggactctgtgccgatgcctggaccccatagcccgcagcgttctgcgttagtcacaggcctytctgctggagcaagggctgcccaggcttctggcctctcataaagcagacaaacgtgcttattttgaaaagcgtaatggcaaagtgaagtgaattcctttataacacatacttacaatccagccagccttaactatcgaccccaggcaggcatcggtgcttcacagtctggtccgctccgtgcggattctgtcttcggcaatgcatcacaccttcctaaggtgatatcactctggatgtcagtggccctgccctccagaagctccccccaaccccggtgccagggctgttcagacgggagttcttaggggcagtggatggcacatcggggagggcagggcagggcttagatgaggctccacagagaagctggcctttgggcagagcacagggactagcgtgggtctcaggggctgmaggtgagaggaatgagaatggtgcagcctggatgtggggtccagtgtgccaaggacatgccagtaagaggctggcaaggtggaattcagaatcggacttcatagtgtgggaacttcatcttcagcagccactaagaaggacttgggcctgagtttcactgcagctgatggaatcagctccgctgaggtggacacaggcaggttggccccgggggagggggaggggtgccttgctgctgcagcattggtccacaagcggcagacgttcctcatctgactcccatgcaccagctccccagggaggccacgccaggtggagctgcatgctggtcaccagcagtggggcctaaagccatccacgctcccacacacccactccccagggaggccaggccgggtggagctgtgcactggtggggcccgaagcccatccgtgctccggtaccaccctcatgattaagagattggagcaagacaagaggaactcctgagccatgagtgtggaagggaagttgcactcttattagaaatgaaggaggatgctttggaaatgttcaaaacagccacttgctgagaaaattgcctccatgtgcaggtgaatgagacacctgtcagactgatgaaagtgactctccaaggacctgcactctcctcaagggtcttccaggcacagggatcccagcgctccccttcgccagacctccagggtgcagctgagaaacagcgccagagcagtgagactggaggtgtggcctgggcagcccggctccaggttccgctgcacgtgggccgctgtgtcacgtcctccatggagctgagctgctgccaggatcaacgcaggctgggggctcctgggctccagctgtggctggcgtggggctcgtgctcatcctgctgctccgcagccatgaggttgacgatcccacagctcgcctggctgaggtgtcacccagagtgggcgagggagatgctcagagggaagcaccacgctctcctcctgctcttagaacgtccctgactcacggcacagacacagacgatgaggagtaactaaaaagaggagcctctaagagaaaaagatgaagaagtggagggcgcggcgtgggaagcgtgggccggtggtgctggtggggtctgcacagtgggccccgcaggctcagtgcccgtctcctgctggacctgctgcgttgggggcggggagggggcctgcagtgtgtgaaccagccccagcttgtgtccagggccacgtgggctggacatggaacaagaactcccacctgcacgggagcgcctcccctgggctgccggagagaccagcagacaggaacattggtaaggactatggcgaggttctgctgccaaagagcaggtgccctgtggctgcagccccaggaggttgtaaacaagtttcggtttggatggaggctttagggaatcggagatggtaggagctgcaccccatgactccattctgaacagccaggtaattacttctggcattttgacaagtgtttgcaggagtggagctcagggctggcagcacccaggacctgtgctgaccttcccggctgcgaggacagaggccacccatggctctgtaattacaagtcccgaaagccgccttcatcatggctttaccctgagcgcagacaacacaacgctgtggtagaaaataattgcatcgccatcgacagggctaccagcgtggaacgccaggagccgcatgtgggggacactcggggatactgctaaaccaagggctaggaaactgcgttgctcagcagccacttttctgtgtttatttttacacagagggggtttatgcactggacataccactcatgggagcagctcgttctcacctgcaaatgaacgagcaatgctgatcctgctggcagagggtgctgccttgtcccctccgactcactgctggggagcacctggcccccctccaactcactgctggggagagcaggttccatttcatcctcactttcacgttcatttagaattcataccctgatcagggagaagagcccccagggcctccagcttcccctccacctcgggagccacgtcrgcacgtctactgcgaggggctgactgtcacaggtggccacgggagctcacccctagttggctggggtttgggagcagcctagataaacacccatagaaatgccactaagaccttttcatgccaaaagttgtaaaacccgcttctgaaaaacatgagtgagagttttgaagtgcgtgggattctctgcaggctttcacatgtgcaggaggcttccgtggccagaggacctgttagaaacacagtgaatcaccaccacctccctgcgccttctgttgcctgggaagctgccgagggggtctcagctgttctctccacggaacgcccagcctcccagcagagggatcgtcggcaggaggctgtgatgctggtgcagtcggctgccggggcaggtgaaatccagcagaaggccctgtaccctggatgtgcaggagggggttttgctgacggtktgacggtcatggagcacactgtgggcgtcgctgagtttcccaagtattactcttccctgcacatgggtttctgtcttcactgccccaggccccgtggggttagagactgacgggaggacggcaggatggctggyggctgtggccaggacacgtatgtcctcctgtggtagccgtcctagcccactggagatgagctgtgctggaggggagtcccaggggagccgcgtctgctggtgaagatgccgctgggctgtgggcctgggggacgaggcctcaggttttgctggaggagcctgctgtccacttggctctctgttttgctgtgttgaagccctggtccttccatgatgcgaggctgccatgcctgttttcacagccttttcttttcctctttgtccataagcgaatgctgtttccactctttccctcacctctgaatagaaagggcagtgtcttcataccttagtaggaagcggcctcatctccgcatagaaagggtagtgtctttataccttagtaggaagcggcctcatctccgcatagaaagggcagtgtcttcataccttagtaggaagcggcttcatctccgcatagaaagggtagtgtctttataccggagcagaaagtggctcattttaaatcagggctgtgttctgcagggcagctgggcagggcatagctttgagacctgaaggaggaaagcaaggggtgcccgaggaaggtgcacttggagcctgcagggagaggccagtgcggccctgaagccaacgcatgggcccacaccctcccccgggcacctggagacacaacttccagccagcacacaggtgcccaccatgctccttcctcctgcagccgcggctcacaggctgtctctgagctgaggggaggccgatgtctgccagaagccacttcttgggagttcttctaccaatatcagttcccatggcaactcgacagaagcagtaggggcagaggagccgagatggttctgagtgcaaagatggtgctgagtgcaaaggtggtgctgagtgcaaaggtgatggagagtgcaaagatggtgctgggcacctacctccccagcagatcctgcctcagctacagccgagccactgccctctgtccctggtggtcggcccaggagtcctgccctgtagctgcaccaggtcacaagcctgggccatcttgggcagggcagagggtttctcctgctctgccatacctatgggccccttgggacaagctcaggtcttgagacatgaattgtccaaatattatgacttttgagagactctgaagggctcaattatttaaaaaattatgttccgccagcccgttggcatctgaaactctcccttgttgtctccttgtgctttggggaccctacagggctacacagcagctggagtgtgtggcacaaaccccttggcagttggtgtcccctgtgagtgcacagttgatcagactaacacagagtcaccttggtgagcccaggaaagttcctcctgacaccaggactccggagaagcagctcttggttggaaggcaggggaggttcagtgaagtccgagagctgcctgggatgggtagggaggggtccctgagcacttgggaccagcatgaggctattcagcacttgggaaacaattgctcagaagcttgtctgctggggacgcttgtcacaggcaggtcttacctggtcaacacctgcccaaggcccctgggctctcaggccttgcatctgattctttgcacttttcctcccagcacgggaatgccaaagctctgaaggcccattcttgaaaatttacatgatgattcacacggcaaggctggcatctgagtcccctggccctgtaatcgttcttaataaggagggcactgcacaccatcaggcctcggacttatcggccaggacagcattctacgtatttgcattattggacaagagtccttgggtgaggatgagtgggttaaatgcacgctggtcagcagaaccaaaaggttcaactgaatggcatttagatcctacatgagcacctccaccaccatgagcacctccatactacgagcacctccaccaccacgagcacctccaccaccacgggaacctccaccaccacgagcacctccaccatgagcacctccatacgacgagcacctccaccaccacgagcacctccaccacgggcacctccatacgacgagcacctccaccaggagcacctccaccaccaggagcacctccaccacaagcacctccaccaggagcacctccaccatgagcacctccatatgacgagcacctccaccaccacgagcacctccaccacgggcacctccatacgacgagcacctccaccaggagcacctccaccaccacaagcacctccatcaccacgagcacctccaccatgagcacctccaccaccacgagcacctccaccaccaggagcacctccaccacaagcacctccaccaggagcacctccaccaccacgagcacctccatcaccacgagcatctccaccaccacgagcacctccacaccacgagcacctccaccaccacgagcacctccaccacgagcacctccaccaggagcacctccaccaccaggagcacctccatcatcacgagcatctccaccaccacgagcatctccaccaggagcacctgcaccatgagaacctccaccaccacgagcacctcaaccacgagcacctccaccaccacgagcacctccaccaccaggagcaactccaccacgagcacctccaccacgagcacctccaccaccatgagcacctccaccaccacgagcacctccaccaccatgggcacctccactaccatgggcacctccaccacgagcacctccaccaccacgggcacctccaccaccacgggcacctccatactacgagcacctccaccaccacgggcacctccaccaccacgagcacctccaccaccatgagcacctccatactaagagcacctccaccacgagcacctccaccaccacgagcacctccaccaccacgggcacctccaccaccacgagcacctccaccaccacgggcacctccaccaccacgagcacctccaccaccatgagcacctccatactaagagcacctccaccacgagcacctccaccaccatgagcacctccaccaccacgggcacctccaccgtgagcacctccaccaccacgggcacctccaccaccaggagcacctccagcaccatgggcacctccactaccatgggcacctccaccaccatgggcaccaccaccaccacgggcacctccataccaccatgggcacctccaccaccacgggcaccttcaccaccacgggcacctccaccaccacgggcacctccaccatgagcacctccaccaccacgggcacctccaccaccacgggcacctccacaccacaggcacctccgccaccaggggcacctccgccaccacgggcacctccaccaccaggagcacctccaccaccatgggcacctccaccaccaggggcacctccaccaccaggagcacctccaccacaggcacctccaccaccacgggcacctccaccaccaccatgggcacctccaccaccaggagcacctccaccaccaggagcacctccaccaccacgggcacctccaccaccaggagcacctccaccaccacgggcacctccaccaccacgggcacctccaccaccacgagcaccaccaccacgagcacgtccaccaccacgagcacctccaccaccacgggcacctccaccaccaggggcacctccaccaccacgggcacctccacaccacgagcacctccaccaccaggagcacctccaccaccacgagcacctccaccatgagcacctccatcaccatgagcacctctacagcagttggctgcttacctactgaagctgagggcaatggagcctccttactctaggtcagtccctgcttttggatgtctgctgtgttggccatagtgcagtgccccatggattaggcaccaatctaggtcaggtatcagcctctccagccctgcctggatgttctgtgccacttcatggcacctgaggttggcaaaatggaagaaggaaaaacaagagcttggagtttagaacttgagttcacagcaccctcccagctatttgcttgttttgtgactttggacgactcattgactgttttcaaacctcagggtgccttctctgtcagctagggccaatagttacactccgcgaggctgcattcagatcaaatgaagtgggaataatttgatgtgagagcaaaatgtaaagtctgagcagtttataagttgttggttgccattgctcactcaagatgtccattggccttgcgtgcctgggcatcccacgaatgcctggagtgggaaagatgccatggcaaatcctcatgaagtactctcttttcagtagtgttctttacttggctacaagcagacagtaagatgtcatggggttagaagaatagcaacaattgtgggtaaagaatggaggaggtggggcgtggtggccatgcctgtcatcccagcactttgggggttaagaatggaggaggtggggcgtggcggccgagcctgtcatctcagcactttggggggtaaagaatggagaaggtgggggtgtggtggccatgcctgtcatcccagcactttgggaggccaaggcaggagcatcacttaccaggagtttgagaccaggctgggcaacatagtgagaccccatctccacaaaaatatttaaaaatttagccaagcgtggtgatgtacctgtaagtcccacacaggaggttgaggtgggaggatctcttgagcccaggagttccaggctgcagtgatctgtcacaaccatggtcacaaccatgccactgcccctgagcttgggtgatagagcgtgaccctatctctaaaaattttgtttaaaaagaatgggagaggatcttgagctgataagacccaccgtgtcaggcactaagacatcttcttgcagtgctgctcactcctccctggactgtcttcagtgtcaagatgaggccgcttcactaacgagatgcgatgattcgtatgatgcaaagcccacggcttacagagagcacgtgaagatggtgtcggcagcagggttatcacatcctctggcaggcagcttgggaagggaagtttcaatctgtgttgatattttagcactgattaaaggtggatgtacaattagaccttttaaatttaaagacagtttgcactctatcaacaccttgtcttattacagttgtaatccatgagaaagcaagttaagaatgagaagtcatgggcaaaagtaaytacacaatttcctcatgtggtataaaatggtacaaattgaaaatcccatcagcttcacagcccttgaccgaccaaaatgacatcccccaatgaatgctggtggcaggagcttaaggtgcttcctgcttagagagatctgcatttctgtttagaatgaagcaggtgtagataccttagttcacagtgatgatttgggctgagtgctcacattcaataggcacccggttccagtggtttgcggggtttgatgatgcatttttaaagtgaagccgtaccaatgcaggcccatgcttccctgaggacgcggcctccgttctgctgagtgcaaaggtggtgccgagtgcaaaggtggtgctgggcacccacctcctcagcagctcctgccccagctgcagtccagccactgcactgggtccctaatggtcctggcgtgggagctgtggcctgggcctcctgtgcactgcaccgtaccctcggctgccatgagcacgggcaccccayggggacagcaagctcagcacccagtgggcctgatcagacagccgcctgcgtcgtttcatggctttctccttcatgttgaaggagtgacagggacactgagggatgaagtccccacgctctggcctgctctgctcagtcagggccgctggcatgggccgttcttcccctgggactgcacagcctggacccccaccaagtcctgttgcccaccctggctcagctctcctccagcccagcatgcctgccttcctccctcctttccccatacccggtcctgccatctcccagctgcaaggtccatgccaccccacaggaagagcctcagcggctgtcctcagaccccaccctgtctgccccgaccctgccgcctcaccaaattctaagcacaccatgacccggcctgccctggtgtgctgcccatggcccggcgtgacccagtgtgctgcccatggcccagcgtgacccagtgtgctgcccacggcccagcctgacccgacccggtgtgctgcccgcggcccggcctgacccggtgtgctgctctgggaaggaagcctggtgggaacagtgctcactcactcactctgtcactcgctcactccttcacgccttgtctctggcagctttcgccacaggcagagctgcgtggtcacggtggactgcccgacccacaaagcctccgacactcactctccagcccgttacagaaaccttttctcaagattgtagaacagcagttctgcaaacggggcccctgagcaccagctggaggtcgttaaaaacgcagactcttgggccccaccccagaggttcagaacatgtcctggaggcaaggccagcaagccattgggagcagcccccagggacctcaatggcactggagccgagtaccactcacagctgcagtccaagagctcctgaagacaaacccctgccccctgccagctgggagctcctccacagtagacactcagcaaatgcctgctggccggagcagcggcagggaaggtagacgactgcaaggcattggaaacggcccctctgcatcaggagacaccctgggtgcaggaggaggcttcgctgaaaagcattgcaacagcattatcacatacgtggaaataagaattgcatctcaacccttcccttgccctccacccatctaacatgcctcagccctcctgtggccatagtaacctgaacagtaactacagcagcaggctgcttaggtgccaggtgtaagaagagaaatttcatgaaaacaggaaaatatagcctgcttttctccccagctctaacctttcaacctataactactccctactgtaatttttgtgggatttgctgatattgaaggaagatgattgaaaatctgcttaagatttygtctttatttcccgcttgacaggcctagggccccactgaggaagtgtttctctctgcagagccctcagccaccccatatgtcccagggatgtgctcaagtcacgaggaccagtcctttgtgtcacatcctgaggtccagagtcacctgccagccttgccgtctgcttggcattattaattttcccataaagtatacaatctgggtaaggatgtattcgtaagggacttcaccaggtgagagtcaccacaactcaggtgtcaggtgtgtgttttctaaagccgatcttagcgttaacgttctcctgtagggaaaactactttctgtctctctacagtgcctggttttggaatttctccacggtgttttgtaaatgtcttgtgacaccagctgaaaaggctgtgttcctttgagcactcagagcccttccatactgaggagttgggaggtggttgaaggaaaggaagcagcacagcttagagcacattctgtggcaaaactgccagagagagcctggggtagccatgctgcaggtcagtgtgcctgtcggccctggccctgagcctggcagcccatatttagagcctcatttcatcctggagccagaagggtggctgtttgcagagaaggccttgaatggaggggactcatccacctcatggaaggtgccatcccaggctggtggttgggaacggagagggaggcagagggggcacaccatcttgctgacggagtcttattttttgtgatgcctccgagcctcaagacccccaagctcacagccattccttgctagagaaacaaagcagcatattatgtgattttcagaggaaataaatggaaacatacaacgtcatgtcagagggacgtgggacacataggtaaactgaggcatggaaagaaagcccgtccctgtgtgaggttagagagccagggcaggatctttccctgaacgaaactctttgcatgcattcctgcccatccacctcttcccttttaaaaacattttcttcaagaattgaatggccacataatttcttattctaaaataagacagaaagacagtgccattcccatgctctggggtaatttccattttaaatacgcaatttctcctcttttaatagaagtcagatttcttttatctgtaattaaatccagaatatggttttttttaaggtcctcgtggagttttgactttactgttctgaaaatgaataagagttctgagcgtcagtttagtgaacaactcaactcattatccgctggttgtgaaatacaaaaccttggtctgacccgtgggggccgtgtggtggtggcagcccctgccctccccccgggtctgatggctccatctgccccgccagccactgtctttctggccgcagcccgttagcccagggccctttcagcactgacctgagacttggctctgacttggtcagatgaccatgtgaacacagctgcttctggaggcccatattccgcaaaccatgcccctgctcactgcaggattctgcacgttgcattttggagtaagtcttcggtagaccttacaggactcccccatgatcttatgtccttggttttcatgaagggtgcgaggtaagaaactcattgagaaaactcacctgaagctgctgaggaggctccgccaagtctctcagccaggacacgcctgagtgcatcttggggcccatgaccaggagagacgttggtgttcctggtgaactgcatggttcctgccaccagacagtcagagccactgccatgtcaggcgtttctctcgtcccgagtcggcaatctcactcccagattttgkgctcacctgcttagcttctctcacccagaagtatgccagattacagtcaattaccagatgcgcagcaccatctttctgcctttcttcccctggattacttgtttctcagccttggtctttattaagctgagtgtttatgcctgcgctgcctgcagcccctttggaagcaggtgaagcatccatcatccataaaattggccactctgtgcsccatccccaggaggccctggcactcctttccccagggacacccracagcccagcagtcatcacagagccacgctgtgacttggaggagaatggggttgagccaggagtcagttctgttgcggggagggtgaccctttctcttccctcccctgcaagtagaaaatgtcccccccaccagtcagcttctggaaatcactggcacagggggggctttggtgagtgggagatgacagaggccctgaggagaagaaaaaggagcatctggggaggaaggagtccttggcgtccctcagacacagtgtgtagatggctctctttttagcagccagattccaggaaacagctggacaggaaaccatggggcagtgtccggcgtgaccagtgtgtccaagcaacctcacagcgctgggctccccaggctcccccggctcccccatggctgtgaccccagtctctggccccacagctccctcatgcacctcccatgctctcccgggggctgtggctgtcctgggcatctcgtcttggtcgtctgggtaacaggtcctgagagacgtccccaggagaatgctgtgcatgtcccgggctctccagctgcttctgagccctggacttggacacccagcacatgttcaggttgccagagtcaatgcggttaaaccccaacttgctcgggatgcctgtttgttagatgaactatgtggaattcaccccaggtttctctgtcctcgtatgtgggaaggtttgtacttagaggctgagacctcgtcgcctctagcagcaggcacaggcccctgcatggccacattctgctgagatggtccctgctggtggaattgtggtatctcactgagcatgtgtgttgtcttgctgtatgagcccgtgtctcactgtgtgtgtgagtgattgtatgtagtgtgtgtctctcactgagtgtgtctcactttctgagcacatacatatgtgtgtaagtgtgtagaatggtcattagctaattggtattaggttttgtcgtggttgccttctggaaactctgtagggcaccccattccctgacctgctgtgtccagaattggtgggttcttggtctcactgacttcaagaataaagccacggacccttgcagtgagtgttacagttcttaaaggcggtgtgtcccgagtttgttccttctaatgtttggatgtattcagattttcttctttctggtgggttcgtggtctcgctggcctcaggagtgaagctgcagaccttcatggtgagtgttacagctcataaaggcagtgcagacccaaagagtgagcagcagcaagatttactgcaaagagcagaagaacaaagcttccacaatgtgaaaggggacccaagtgggttgccactgctggctcgggcagcctgcttttttccccttatctggccccacccacatcctgctgattggtctattttacagagagctgattggtctgttttacagagagctgattggtcttttttgacagggtgctgattggtgcatttacaatcccctgagctagacactgagtgctgattggtgtatttataaaccttgagctagacacagagtgctgattggtgtgtttacaaaccattagctagacacaagagtgctgattggwgtatttacarycccttagctagasataaatgttctccaagtcctcactagactcaggagcccaactggcttcacctagtggatcctgcaccagggccgcaggcggagctgcctgccagtcgtgcaccgtgagcccacactcctcagcctttgggcggtcaatgggactgggcgccgcggagcagggggcggcgcttgtcggggaggctcaggccgcacaggagcccatggcgaaggggaggctcaggcatggtgggctgcagatcccgcgccctgccccatggggaggcagctgaggcccagcaagaatttgagcgcagtgctggtgggctggcactgctgggggaaccggcacaccctccgcagctgctggcctgggtgctaagcccctcactgcctggggccagcagcgctggctggcagctccgagtgtggggcctgccgagcccacgcccacccagaactcgtgctggcccgtgagcaccacgcacagccccagttcctgcctgtgcctctccctccacacctccccacaagcagagggagccggctcaggccttggccagcccagagaggggctcccatggtgcagcagtgagctgaagggctcctcaagcagggccagagtgggcgccaaggccaaggaggtgctgagagtgagcgagggctgcaagggctgccagcacgccatcacctttcactgccactgacagtacctgggaaactgcagagccccacacacatgtgcactgactgtaacagcaggaatacagccagcacctgcagccctggctggtgtccacaggactgagtttcagtcccatagccttgacttacctgtgatgttggacacgttggtctcctccagccttgttttctccatctgtgaactgggccaacgctcctctgctgtgagctgatgcgaagccacctcagataacctctgtgctcagtgctctgtgccatggccatcgcccgtcgctttactgaggctrttgcagaagtcagcgtgggctctgggcttccgcaccaaggtgcgagatgctcaccccgtggaatgaggttgctctgacagcaggaccatggccgtgctcatgcccagctccgccttcgtgggacaccacgcatgggcactccctctggttggggaaaaactgtcatactggattgtgttccttttttgccttaaattattagctgccatttttgctcatcaaaaaagtggcattaggcacttccacatggatcgaagggccctgtcactagtgggttcctgctcagagcgtcttgtgtgatgtttcatcttgatgctttgacaggttaacaaccttctcatcaggatcattgttaggtccttcaggtgtggtcctggggaccggtgatgaaggacacccccattgcatctcagctacggctcttggaccatgggcagcggtgctgaaatgacaatcctggagccacagscttcctccgtccacagccagtgtgctcacggacgacacamgtaattgtggacaccactttgccaccacgactgtttatgctgcagccccaggggccacagcagcagctggtctctcctcaatgatggttcagcgccgagtgcattggcggcacggtccatttctctgccgagcgcttgtgttgtgcctggggtctgagccacagcggcaggtggatgggagagattccctcggaacaggtgtctggagcaggtgggttgcggggccactgtcaagcrcgtggggactgtgcctgtggcttcatccctgcgtggactcagtcctccccttgttttaagtggtccctgggtcctttgtgcacatcagtaattgcagrggcgggacgcgcactctctgagcggagcagcttggctgggcttgtccctttaatttgcgatgcatcacaacaaatgattgtaatcagtcaccgcccgacggcggcctgctcttccatgaccacccttcagtgagccggcagctgagcgacacggacaaagccgcctggctcagggttggggaaaacactctttagtcagtagagttaaaccacctgatttattccatattgtggaaggtcagtctgatttaaggaaatgtcagtttgatagaatgttttgaaagaaatgcagctcataaatactgcgctgaaagctcagccttgatacaagctcacttggtaaaataacttaataaaggaaactttcgattcaaacaaaaagccttgaaaggtccttcttcatccctccaggccatccttcttagcaaggcctacatggtctctttccatgccattcatcgctttgcaaaaccttcccatattcataaataggcaaaggtaatgaatgcaatgtctctagcaggctgcctggtgtgcagtggacactctgtcaaccatttctgggtgacacctgctgtggggataatgagacctccagaaagttatggtcaaaacctaacccctgctacctgtggatttggccttatttggaaataggatctttgcagatgtcaataagaggaggtcagactccatgagggtgggtcccaatccaacatgactgtgtccttagcagaagaggggatcacctcgtgaaggtacagacacagagagcggccatgcgcagacagagacggagaggtgccgccacagccgtgggagctggggagaaagcaggttacacacacacggcgagacagtgagacctgtgatggcggccgctgggggctgcatgggagatgggggagtttctaccctgcagtgatgtgtcaccgtgtgcagatggagtgtggctgcagtgatgtgtcactgtgtgcagatggagtgtggctgcagtgatgtgtcaccgtgtgcagatggagtgtggctgcagtgatgtgtcaccgtgtgcagatggagtgtggctgcagtgatgtgtcaccgtgtgcagatggagtgtggctgcagtgatgtgtcaccgtgggcagatggagtgtggctgcagtgatgtgtcaccgtgtgcagatggagtgtggctgcagtgatgtgtcaccgtgtgcagatggagtgtggctgcagtgatgtctcaccgtgtgcagatggagtgtggctgcagtgatgtgtcaccgtgtgcagatggagtgtggctgcagtgatgtctcaccgtgtgcagatggagtgtggctgcagtgatgtctcaccgtgggcagatggagtgtggctgcagtgatgtctcaccgtgtgcagatggagtgtggctgcagtgatgtctcaccgtgggcagatggagtgtggctgcagtgatgcgtcaccgtgggcagatggagtgtggctgcagtgatgcgtcaccgtgggcagatggagtgtggctgcagtgatgcgtcaccgtgtgcagatggagtgtggctgcagtgatgcgtcaccgtgggcagatggagtgtggctgcagtgatgtgtcaccgtgtgcagatggagtgtggctgcagtgatgtgtcaccgtgggcagatggagtgtggctgcagtgatgtgtcactgcagatggagtgtggctgcagtgatgtgtcactgtgtgcagatggagtgtggctgcagtgatgtgtcactgtgtgcagatggagtgtggctgcagtgatgtctcaccgtgggcagatggagtgtggctgcagtgatgtgtcaccgtgggcagatggagtgtggctgcagtgatgcgtcaccgtgtgcagatggagtgtggctgcagtgatgcgtcactgtgtgcagatggagtgtggctgcagtgatgtgtcactgtgtgcagatggagtgtggctgcagtggtgtctcactgtgggcagatggagtgtggctgcagtgatgtctcacggtgggcagatggagtgtggctgcagtgatgtctcaccgtgtgcagatggagtgtggctgcagtggtgtctcaccatgggcagatggagtgtggctgcagtgatgtctcaccgtgggcagatggagtgtggctgcagtgatgcatcaccgtgggcagatggagtgtggctgtagtgatgtctcaccgtgggcagatggagtgtggctgcagtgatgtctcactgtgggcagatggagtgtggctgcagtgatgcgtcaccgtgggcagatggagcgtggctgtagtgatgtctcaccgtgggcagatggagtgtggctgcagtgatgtctcaccgtgggcagatggggtgtggctgcagtgatgcgtcaccgtgggcagatggagtgtggctgcagtgatgtctcaccgtgtgcagatggagtgtggctacagtgatgtctcaccgtgggcagatggagtgtggctgcagtgatgcgtcaccgtgcgcagatggagtgtagtgattctactgcagtaagtggctagattttcatggaagaaaagaaaactcttctttatgcagatttacttacaatagatcattgtacttatttatttctagataattatttgtaaagcctgcaactaaggaagcattctgtatatgggttgtgaggagggaaactttcccattaaacagattagcaggaaacaaggaaaaaaagataatgtcgtattcgtagacctgaggactttaactccttcacggcccgtgtttccttgggaagcttttgctgtgtgtctttccaggtgtggtctggctgccgttgtggaccttgtgcacatgaacatggcagatgggggcagatgaggggtcccaagcagccacgctgaggagctttggggagtggcggggatgctgaggctgggttcttggagactttgctgtggtccttttcctcatgaggaagtggggcctgggctctctggggtcctccatgcacccacttccctttgctcaggaggggagggcagctggccgtctgcctcacccactccaggccacagtgccacagcgttacgtgtgtttcccaaacacagactaggaaagaatccagaactctgttgtggggccagcaggtgagactgcagaggctattcctcgggtgtacctgctcggtctgtgactgactgtgttatggaatccaaatgcttgtcctgaaaaagagaccatcatcattgggctttgctgcctgtaacgtggaagttcatctcaaatcctgtttttccccaagtttgacgattctagcagaacagtcatgggaggctgtcaggagattcagtttcctgtgggcacagcagaagagcaaagtttctggttcattctgtggttgccgagaggcagatgtgctgggcaggtgtcaataggaaaaagcaaaaaggagggaaaggtgggttaagggtcatttctgtatttatcataaaatagaattgcagaggattgatgatagatgctcccgcgtccacaggtgctgagcggaatcgggagctgggcagcrtccccgagttgccaataaccacagagggcgtgaccttggggtcgctgggtgggtctagtgcatcttttgtttttgtttgtgaattttaaaagcttgatggacacatccgaggtggctgatcatcggataagggcgacattgtgagcctggaatgccacgagtggagcacgcgtcccgatgtgggtggcacagctgcacctgcttccaccatgctggatggccactcaccgtcccctgacctgggatgatgcgtgggacttaatgtgcagcttctgtaaggactccaagggggtcaatgagaggcactgccagggagagccactgtcctgctgtgttgattgtaggcactgaacaagaatcactcaaaagcattggcaaaatgtagctataagaaataggcctcactggacgctggagaagcagcagcaggagtccagcacactcctgctccagcagctgaccgagctttgtggagaacgggtctgctgtggctggtgacgggatgcacacgaaaacatcccatcgtcaaaccgagcaccctttcaggggcttctcctgcccatcctaaacccaggcacatgtggaagtattttgttctgttgaaaaatgcacacaaaagtgatttttacaaatgtgtttttcccaacactttcccctgggctcatgggaggacggagagagcacccactgtttgagcaccaaatccagtgcctgccgcccccatggggacagagaacaagccaggtgtgcccccctgctcccggcctctgtgtggatgaggccccggggagtgcctggtggccatgctgtgatggctcagggcatccattaaggagatctgaccttgtctggggcagggtgacactccttggcagaggtgacctttcaggcgagattagcaggacctgcgggagttaccaaggccaatacgaaggcaggaggagcttccaggtggagggagtgtgtgggagaaggtctgcattagagcagagcaagagcctccraagattccagactgaaaaaagcagcaagaaccagacagagaggaaggggcctcggcccggactccayccacaggcagtggggtctggaacagggccccgttagaagtrtcgctctgtgtagggtccagccccacagggtcagtgggtttttctccccgtgtgtggagacgagagatcatagaaataaagacacaagacaaaaagataaaagacagctgggccctggggacaactaccaccaagtcacggagaccagtagtagcccggaatgccaggctgcgctgatatttattggatacaaaacaaaggggcagggtaaggagtgtgagccatctccagtgataggtaaggtcacatgggttacgtgtccactggacagggggcccttccctgtttggcagccgaggcagaggagagaggagacagcttacgccattatttctgcatatcagacttttagtactttcacaaatttgctactgctatctaaaacacagagccaggtgtacaggatggaacatgaaggcggactaggagcgtgaccactgaagcacagcatcacagggagacggttaggcctccggataactgcgggtgggcctgactccacaagaggtggaggagtggagtcttctctaaactcccccagggaaagggagactccctttcctggtctgctaagtagcgggtgtttttccttggcactgacgctaccgcttgaccacggtccrcttggcaacgggcatcttcccagacactggcgttaccgctagaccaaggagccctctggtggccctgtctgggcataacagaaggctcacacccttgtcttctggtcacttctcactatgtcccctctgctactatctctgtatggcctggtttttcctaggttatgattatagagcaaagactatgataatattggaataaagagtaattgctacaaactaatgatgaatgatattcatatataatcatatctatgatctagatctagtataactattcttattttacatattttattacactggaacagttcgtgccctcagtctcttgcctcggcacctgggtggcttaccgcccacagctctgaccacagtgaaggggacggctgggcagagcacgaaggatggggagcaggcaggggccacctgrcctgaccttgggcactggcgtgcrggctgcagtctgcaggtgtcttggaggtgccagcagtgggatttggtgatggattggacagaggggaagatacaggaattaatggtgcccgcgcccccaggcacatcagctgcaatcatggaaggcagggctgacggtgctacggggcacactatgggcaggacttggtttggggtaggtggaggctctggtgcctgggagcagccgtgtagaggtgtgggatgggcagagaggtgcatgcacccccattactgggcccgccaaagggcctctcctggttgccagattctggagaggaggctgcacctgcgagacctcacccatgggccacctgaaggtgttctgacgtgttcgttgcatgaataatcaaccgcagaaaataatctcacggcatgtttcatagactcgactcacagacaaaaacagccggtaaatgtrtgtttttccttcgtgtcttcctctcttgctctgtcccccatcccacacagcagtctttttgagtgtctgcagaaagggtgtggcctttctttcctgaggagtgtcctgtccccaaccctgtcccactttgggacttcagcagttttcttcttggtctcaggacaagcacacagtcgaatcggcccacgcatgggaaaatttcggagagctgtgttcacatcacactccacaggcacattcctacttcacacaggccctaatcagaatagtaacttttagccgaaacctgtgtgtcagtgacttctctctagggcccccatgctctctagggtctctgcatctctggggtctctccgtctctggagtctctgcatcactggggtctctccatctctaggatctctgcatctctggggtctctgcatctctggagtytctgcgtctctagggtctctgcatctctggggtctctgcgtctctagggtctctgcatctctggggtctctgcatctctggagtctctgcgtctctggagtctctgcatctctggggtctctgcatctctggggtctctgcatctctggggtctctgcgtctctggagtctctgcgtctctggggtctctgcatctctggggtctctgcctctctggagtctctgcgtctctggagtctctgcatttctggggtctctgcgtctctggagtctctgcatctctagggtctctgcatctctggggtctctgcatctctggggtctctgcatcttccgcagcggctgtcccacagcttatttacaagcagcttcgggcaaatgcctgccatgtttaaatacatctccttttaccacattaaacctattgaacctctttacgtgtgtttataaaacacaccaggaaaatgtttctttccattttgtcataccattcgttcctcttcagaatttcccataatatcagaagctaaagctggttctgaattcttttcttttctgtcttcgctgttttccccttttctgtgatctttagctacacgttaattaaacagtcagagccacatcggagttcgctgtgctgtgagaggatgctgggcccttccagtggtgcctgcaggccctcctttctcatccagctcatgtttctccctcagtcactatggctcatctgctccagttgtgagattttcctacagtgtcagtcatttttaaagcgccttttagttcccagctgcagatggcccaaccatgaaggcacactcagaaattcccaggtaagcctgtgtctccccagccataaaaattcctctaggttagtttatgaaaatcacttttattgacatgacttgaaattgaaaaaaaatcccctcccaggactgagagagactgtgcttgctgggggttgtgcccactgggtgcttgggaagcagacgccagggtgggatcgatgggggccagcctgggcagggagaaggcggcagagnnnnnnnnnnnnnnnnnnnnnnnnnnnnnnnnnnnnnnnnnnnnnnnnnnnnnnnnnnnnnnnnnnnnnnnnnnnnnnnnnnnnnnnnnnnnnnnnnnnnnnnnnnnnnnnnnnnnnnnnnnnnnnnnnnnnnnnnnnnnnnnnnnnnnnnnnnnnnnnnnnnnnnnnnnnntgcagttcgcagaagggcggcactggccaggaagggctgtccctgtagcccagggagctttgtcctaggctggggacagcttgggtggagcctggcctcgagggaacgtggtggaccccgagtggctgggaactgtggccaggtgtctccaaaagatccaaagggcacccctccacagccccctcgaggcaaagcagtggctgcacccctctaccctctccaggaggtccaaagggcacccctccacggcccccacgagacaaagcagtggccgcccccctctaccctctccaggaggtccgaagggcacccctccatggcccccacgaggcaaattagtggccgcacccctctaccctctccaggaggtccgaagggcgcccctccacggcccccacgaggcaaagcagcggccgcacccctctaccatccatgcggcggagactcagggcttccccaggaggctgggtgcctttggtgctgatgctcttggtggccaaaccacacttaattttatttcattattttaagaacttcccccaataacccacagaaccagtagtcactgcttctagaggaatctaattaaggctttctctctgtctttaactttcgcaatccaattttcatacctgggtttcttcactcccttctaagaggaagtcggaaaccaatcaacaaatgaatagaacatcaaaggcgatcacttatgatggagaatgcataataaacattagcacgtttcacaaaaacatttcctcccgtagaagtcattgccatattaatttaatcctgctgtctaagataatataatctctttgaaacagtcttgactttagtgcacagggacttttctggatcagaggcgcaatttccatcgcctggtgagctaattggatgtggcagcctcctatgcagatggggactctcttgtcaatggcctcccttcagagacaaagagagacaaatgtctatattcattccctcccctcatgcatgagtaacactaccttttccctcttcctcgctctctaccaggtagtcaccgcacatttaaatcttagcttttgtgttttgagctggccaagcctgcaaagctgtttacagatgcctggcagccgggcctacttgtttaagtacagtgtgtattttgacatgtaaatttacatgaggcatatttaatcagtcacagtgatatgctaattggattcatctgtgaactgaataaaaaacacatctaaaaaaaatgaagtgaacctattaccagctgagacactttgtaatcagtgctgaacgtcaccaaaaggggaaaagatgaaggtggcgggcgctcgccgggggagcacgacatggatgtaattcagttagccacttttccagcttcctgagacagacagacagacagacacagctactgcaaaaggcctgcttttgtcctccttggtgctaatcagccaggaaccttggtgcacctgacacagggagggtatgtgaggcctttgcagctgctggcagacagacttgggagggacccaggctggggccagcagctccttgggagtcttgggaagttctgatgtttgaggggagggctgtgcttcctgtcctttaatgtccccacagtcccataatagcctaagaactgggttacatctggaacggagatcaggcagtttcctctctctgcactgtgccgtctcccctcagcaagctggtccagagctgggctggtccacaaagtgacactgctgagagctggctgacactgctctgtgctggatggggcccttggggacaacatagtgccctccagacccccaacagatgccccctgcagatgcmccccatgggcactgctagcatctgtggcttctcagatgtacacaccacatctctgcatttcatcttttgggcagagactggcaaaggaagaagaaatccccggggtggctccaccgccatggcgtgcccctgggtgaccttccactccaggtggctgttgtctcagtgctcctcactcctgccgtggggagagcacttccagcgggaggggcaagcatccctgagtgcagccagaacccagacggggctgctgaggcctctgagctttcagtgcctcttkgcataaagaggtgtgcacagaggaaggaacaggacttattttcttggtaggcaggtacttgaggagatggagactggcatggaagagtcgtgtgggggacagaatggtgtgggaacctggcctggcctgagtcttctgcagagaaggaggccttccctacccaccctagcacagagctcagcgtgacgggggagagcggggcccgagctgtgctcctggcacctgggagggtgtgcagctgagggaagccgggaggctgtgggatgcaagctgggtggctcctgcatcttggggaagctcagagagaaccagaggactgtctggatgcccgaaagacttctaagaacagcaggaggagtttccagagggagttggcttgaggctctgcagatgggagtcagtaaaaggcattgaggttgctgtgactttgttgtcactggtaaatctggaggacactgagccaaagaaatgtgaaggaaaattgcacccaagatattttcaaattgtagcttagtagaattatgaattaagtttttcattgattctaacagaaggtaaaaatataagcatgatcactttagaacatgaataatctacaaaaggctgcattccctgaatattttcactctttttaaagtaattctaataacagtgttttaaacagtaacctttctgaggccacttcaaaagcattctgactttgatgtaccttttcaggaacacgcttgttatataaatcacaatgtgcccattaccctacatgtattttatttctttcctaataaaatgggggtcactagcagtgaattaatgtgtgcctgcatcattccctgcccctttcaactccttcaggaaccaaaggtaatagctacattgcaacaaataagractgagcaccacatttctatcaggttgcattttttttttgagatggaatcttgctgtgttgcccaggttggagtaaaatggtgcgatcttggttcactacaacctctgcctcctgggttcaagcaattctcctgcctcagcctccccagtagctgggattataggtgcccgccaccacgcctggctcattttttgtaatttttagtagagacaggatttcaccatgttggccaggctggtcttgaacccctgacctcaggtgatccacccacctcggcctcccaaagtgctggggattacaggcatgagcccctgcgcccggcctcaggttgcattctttgaggaccatgtgggatcagctgtgaggctggtgccatggaaaaatataatgttgggccgagttcctcaaggaacttcagctcaaggatcagctgagggtcagtccgaaagagtgagtcctggcttcaggcctgtggatgctcaggcagcagttcaggaggtgagatgagcatgaagagctgtgaaaggaaggaagacagggcagagcatgtagtgtcggagttggagtcacccaccagtgtagcagagagggctgaacatgtagaggaagacggcacagagaatcgggagtggagatggctgggggaatgatgggagatgcccaactgaaaggacaaaggaggagttccagggccaccagtcagatggagatgctgatgacaatgatgatgatgatgatgatagtgatgctgttgatggcgatggtggcaatgatgattgatggtgatggtgannnnnnnnnnnnnnnnnnnngtggtagtggtgatgtgattgatgatgatagtgatgatgatgatagtgatgatgatgatagtgatggtgatgatggtgctggtgggcatgatatgattatgatgcttattgatggtgatgatggcaatagtaacaatgatgatagggatatacattattcctatgtaacttactcaccttaaaatacatcattcaagttttcagagtcaagtcatgttcccttgctatgaagaaaacttaagtctaagaaaatgtaacatgaggaccaagaggagatgcccgtggctagcaggacctggtgatttatagatgcatgtaggacttttccccacatgtttctacatggtctgtaagataaggagagtttctgatgctatagagctctcacattgcagagatgaaaaggcaccatttccccaatattttrtgatgaaaatatacaaacagaaaagttgaaagaatggtactgacctgtgtgtgtgtgtgtgtgtgtgtatacatatgtgtattcatgtatgagtttctatctagacagaaagtgtccttagaagaaagtgtgtatgcaccattcttggccaccttcgatatccatcgggtcccctgtccctgttgctctgaattcggccccattctagctcttcctgcctcatgcctgaacaaggagctgccttacgtgtgttccatgtgctcggtactcctacccccaggtcaccttgcactgccctgttcatcctcctgtaatgccacattggtgggttgctgactcacttgagagctcccggcttgcccattttgcactgagaaaagactggctgcatgttgctctgtgctttgctgtgcaacccagcctcagctctcctttgcagaatggacctcagctgctttctagtgcaccagctgtgcccagcagctgtccctccccggtggcctctaacatgccatcggctctgaaacgccagatgtgccgtgcctcctctcccaagcgcagtgactgcaggcagccctcacatgctcagtgactgcaggtagcccttgcactctcagtgactgcaggcaggcctcacacactcagtgactgcaggtagccctcgcaccctcagtgactgcaggcagccctcacatgctcagtgactgcaggcaggcctcacacgctcagtgactgcaggcaggcctygcacagcacaagtggcctctccttccctgaggtgtgcagtggctccagcctctttggttgtggttactaagattgcccttggacatgatgtgtgtatactccttgtttattctcctgagctgaaagctccttgagagaaagggaactgagtgacctgccctcggctcctggcctgttctgcatggcccatgggctccagcctggcttttttggacttcggtgactgtgcttcttccctgctaaacctgcccatggggactgttgtattcatctgtgtgttcctcagaaagtagcagtgtgtgtcacacagagtctgcactcagcaaatgctctgtgaccagatgagtttgcatgagagaggaatgggatgtggtttgagttgagtgtatctggaggctccattccggggcgaggggcgggggcgtttttaggccaggcctccctcgcagccgctcgcctcccttgtgtaaacctgattgcctgcccctgtactgatcctgcaggattaaggttaaattaaaaataagcatggatggatttagatggactttttggtgagtgggcggaactggtgcaaagctagcggtacacacaccaggaaggaagacaagagctcggcgcctcaatggcagatgagggattattgctgagaaacccgtcctgccgtctccaaaatgtcaggttaggaaatctgcttcaggaaactcaagagcatgccaaggtggctaacagggatggcttttccctgtgttctgacacccagcccggcatcctctcctggttcctgcagccacagtattttaaagtctcgacatcctttagtcccagagctgctgcataacagtgcattcttagaaaccagctgggcctcaggtcatggtggaaggtgtggtgctgagaacctgccacatgagaaatcgcgggattgcctcagtccctgaagggcagtgcacagaacaagacagtgtcaggatgccaggattgcagtgtcaggatgccaggatcgcagcgtcaggatgccaggatcgcagtttctgctcctggacagaacaaggcagtgtcaggacgccaggatcgcaggttctgctcctggacagaacaaggcagtgtcaggacaccaggatcgcagtgtcaggatgccaggatcgcagcgtcaggatgccaggatcgcagtttctgctcctggacagaacaaggcagtgtcaggacgccaggaacgcaggttctgctcctggacagaacaaggcagtgtcaggatgccaggatcataggttctgctcctggacagaacaaggcagtgccaggatgcaaggattgcagtgtcaggacgccaggatcataggttctgctcctggacagaacaaggcagtgtcaggacaccaggattgcagtgtcaggacgccaggatcacaggttctgctcctggacagaacaaggcagtgtcaggactccaggatcgcaggttctgctcctggacagaacaaggcagtgtcaggatgccaggatcgcaggttctgctcctggacagaacamggcagtgtcaggacgtcaggatcgcaggttctgctcctggacagaacaaggcagtatcaggacgtcaggatcgcaggttctgctcctggacagaacgaggcagtgtcaggacgccaggatcgcaggttctgctcctggacagaacgaggcagtgtcaggatgccaggatcgcaggttctgctcctggacagaacaaggcagtgtcaggacgccaggatcacaggttctgctcctgggtctctcactgactagctagccaactattggcaagccctttgcactctctgttccttaggtttcaaatgataaaacaggatgtctgtgctaaacaatctctgaaatctgcaattcagagaccgtctctgaatgtgccagctgckcccacgtcctggggcacacctctctgattcttctttcctctccttcctgtttctcatgtcttgctatggatgtgagtatttagaatgctgacacaaggccaagaccaccaggagatgtgggtgctctgagtggcatttatctggatagctgggatctttaccatggagaagtgaaaaattagaaatctgattaatgtaaactctttccaattacttttttaataaaaaatttatttctccagccatttggagcttcccgacagaggggctagctcagcctcacggatttgttgctgcctgctggaaacaaagaatgggctgctgtgcgccacatgactgctgtcccaaagccaccaactttctttaaagccgggtcagatatcaagcttccagtcatggaggcttttgggtggtttcagcatcaatctctgatcaattcaggggtcaatatcatgcatatgtgtaagttcagcccagtagggtttaagtggatagcaccatattttaatttagaaaggctttctgtaaaatataaccgagcagtggttattgacataactctcaagggtgtctaaggaagagaagttgttgttattgtttkgggctgcccttcactgtttataatttttcctgtctgtgatgctcctcctggtgtcctccaggtgctctcgttgagaattaaatgttgctcctgcagcagactcttttgtacttagtcatcgccgaactggcacctgtcggcctatggtgcaggaaaagatctcttttccaagtagcagagaagatgttaacctgggccacttgagccctggacactgtttctgaggcagagctcccatcttggtcccctgggaccagctgtggtctcttcagcacgggttctccttgtcccctgtggcctcctgcagcctgtcctctgctggtgagtttggttgcagcagagtctttacaaatgatcgaggccccgagctctctgtgcctgcctgagagccagaggctgaccctgcctgagccctggagactgtgctctctttggtgatgcagataatttagaccaagctccaacacgttcccatttagtaggaaaaagaaagacacacacattggagtgcttgctttgtttttatgaattcctatgcaggtgcaggatgtgcggggagaaggggccccagagtcctgtacagattcagcagcagtgaggacgccccccacccctgcctcagggctgtggccgcccacagtctgctggttcaattttctcctccagaggtgagctccccagacgcaccagcttcaggattccccctcctgcctctgtgccacttaagtgttttttatttaaccaagactttctggacatttcttcagttgctgacttttaaaattgtgtaactcagataaagctattctaaatttttttatctgaaacaccctgcagggttgctttgggagttaatgacttttatgaaaatcatgtgtggcaggatgtagtccataagcataagatttacatatcctcactgcccatcacagcctcggcgtgtggcctttctctttatgctttgctccctctgccacgtcsagtgacgtggtcagcgtacgttaggtgctcaacacattttttgagcaaatgacaatcagtctcacacattttatgtaattgctaaatgctgagccaactgtgcaggatggtctgtgcgcttctcccctctcrccacactgtgaagtgtcatttctgaagaaatggtgggtctttccagaagtgtctgcagtgccgggaaggaaggcttgcttacttgggtgccctggcattgagaacaaaggctggtgagtaggtttataaatgtcaagctgcatttcctggcaacctgccttgtgctcagaaattggcctctttaatgcagacggccttgcagtgaggtcaggcccttctccttcccattcacggccatgtctgccacccaaatgccattctctcctgcaggagcttggtgctggggagatattattgttggtgagtatttttgttgaaaaacttaccaaccctttaaagtcaggtgacgagaatgggagtccctctgatgttcatccctgatccctgatcctcctgtccctggtcatgagagtccctctgatgttcatccctgatccctgatcctcctgtccctggtcatgagagtccctctgatgttcatccctgatccctgatcctcctgtccctggtcatgtctacacccaggacacatctctgatttaactaataggtaagaatgttgttagtaaaggtgacacttttttctgtccatgggattaaaacctgggatttgctcccttagattagaggaaagtgttcccctccacatggcacrttacttttatcactaggaacttttttttggtatttttttcttcatgagatggggtcttgctatgtttctgaggctggtgttgaactcctgagctcaagtaatcctcctgccttagcctcccgagtagctggaactatgggcatggccaccacgcccatcaggagcttttcactgtaacttcccccaaactttcctccatttttttggtctctgtcttggaatggcagatgcgttgcacactgaaggattccagaacctccaagagtgttttgctttgtattgaaatatggaatttataaatgaggaaactgttacaagcttttcttttaattatgaaaamagcataatacaaataaattcagaggcagttcataaaacctgttttctagtagtttcagccgtaagtctctgcaagccagtactccctttcttccctggcacagtgggcagcagatgctcgtcaccctggccctgagacactgtcacagacacccatcggattcttcactatggtgtctatcagccggctgtggctcaggacagccaggtcccttaggaagccctgggcctggcctgcccctgccctcccgaagcttgcaggcaggataccagcagcacacagcaaaaacgtgaactcagccgtgacgggatactgcraagatgttaagtgcggggaaagtaaatggaaatgttatatttaggattagttcacagttccatggatctctcatctctttctgaataaatgattcatgcgtgtggtagagagtgcattaccctgtgctgcagagagtgaygtggatcctaccctgtgtctggtgcctgaacttgtgcagttctgagctgtgtttggctttgctccgaagcggctcaccattgatgggaacactgaatccaccggaactcccgacccctctgctggggaagagtcaagcacgatggggcagtcggatgagctcctggtctctgcgtttcactcccctgacttcttttttctggacgtttggaaatccattctctggtttctgtgggtatgaagtatgcacccaaaagctggtgtttcagtgcccgtggcatcttggtgcattgcatcaagagatggaggcccctcacaggctctttcgtgggcagaaagtgcgtgtccagccgcacgatctactgggcctgtgatcgttcttgtgatacagayatctttcttttgacattggtctttgctgaggcttaaagcaggtacatttttacataaagaattcaaaatgatgtgattactaagagtgttgcaagatacaaggatagtaaaggagcctgacatggctgaaggaagtctgtcctttcaccacagactcagccgtgggtaggaagaagtgtgattgggaagggtcacatgtcaatgacagcaaagacttagagctggcctcagaatcaccaagatcatgcaatactcgtttcgcttttttggacccaagcacgcaggtttctctttggccatagatttttcaagagactaaatattgactatttgtagccttcaattgtttcttttcttttctttttgttttctctctcttttttctggagacatagtccctctctcttgcttagcctgtcaccgaggctggagtgcagtggcaagatcttggctcactgcaacctctgcctcccaggttcaagcgattctcctgcctcagcctcctgagtagctgggactacaggtgtgtaccaccaccccaggctaatttttgtatttttagtggaaacagggtttcaccatgttggccaggatggtctcaaactcatgacctcaagtgatctacccacctcagcctcccaaggtgctgggattatgggcatgagccaccgtgcccagcctcaattgtttctttattgcaatgttgttaagaactacttagaaaaaaagcaataagctattattgataatacagatgatgcatttgtattcttgctgtgaacttccctttataactagtagatctcttccaagtaccctggcttccttgctgttcctcaaacatgccaagcaggattctccagggcctctgcagtggctcttcctggtggtgcctggaatgctttccctggtatctgctgtgtcttgtttagatccgagtgtcggacctgtgtcactttccttctgtcagaagagcttcttttaacactacttgaaaagcaggtggaccgggcgtggcggctcacgcctgtgatcccagcactttgggaggccgaggcgggcagatcacgaggtcaggagttcaagaccagccttgccaacatggtgaaaccctgtctttactaaaaatacaaaaattagccaggtgtggtggtgcatgcctgtaatcccagctactcgggaggctgaggcaggagaatcacttgaacctgggaggcagaggttgcagtgagctgagattgtgccattgcacttcagcccgagcaatagagtgagattccatctcaaaaaaaaaaaaaagaaagaaaaaaagaaaggcagatcaactgctgacaaattcctttaatttttgtttgcctaaaaaagtctttatttcttcttcagttttgaagtattatttcactggacatagaattttaagttgggtgttttcttttaacattttcaatattttacttcattctctactcgcttcttcctaaaaagaagtccagcataattctctccgtgcttttctatgggtaaggtaaggtttttcccccctctctggctttgtccaaaawttcctgtctttgatttttctgcagtgtgtgtgcacgtgtgtgcatgtgcagtgtgtttgtgtgtgtgtgtgtgtgaagtgtgtgcacatgtgtatgcacgtgtgtgtgtgcatgtgtrtatgcatgtgtgtgcgtgtccgtgtgtgtgcatctgtgtgtgtgagtgtgaatttgtgtgtgttgtatttacccttcttggtgttctctgagtttcctagatctgtgatttggtgtctggcattaattttgaaaatattcagccattattacttcaaatatttcttctgttcccttttctctttatctcttcctggtattcctattatgcatatgttataccttttgtaattgtcccacagtccttggatattctgttttgtctttttcttttttttttctctctctctttgctttttgtcttggggagtttttattgatagatcctcattctcactgattattcctcagctatgtctgctctaccaatgagcccatcaaaggcattcctcatctctgttacagtgattttgatytctaacatttccttttgattttttcttagagtttccagctctcaaatcacccatctgttcctacacattgtccgttttctcactagagcacttctcatattcatcatgggtatttgagattcattgtctgataattccaatatctctgctatatctgagtctgattctttktctctttgtgattttttycccttttagcatggcttgtaatttttttgttgaaacctagatatgctgtattggataaaagaaactgaggcagattggcctttagcattaggttttatctttacctggctgtgagttaggctgtttactgtttgctggagctgtaattgtcagaggctaaaatttcttctggtgtccttgttttatctccctacttttctttgggtttccctagagacttctccttaaataaagtctgatgtgtgcagttcttttatctgtaatcccctgtcattatgtgggagccctgttggtattgatgtggtggtctggtgtggaaggagggcagcatcctctggccctgtgatcaggtctctgtctcagcctgaacctgcacacctgggctgtgacctcamgaggacttctcagctttttcttttcctcccataagtgaaaggaaggccagatgggttggaattgggtattttccatcccacaacattctggacttatttcatgactggtttcatgctgtagctatcctttcaagatgtgtttttcacacagaattatattttgaggatttatccacgcagatacctttagatctagtttatatgtaactatggcatggtattacagtataatttatgcattcttcctctactgcaggatatttaggcagtttttacattttttctatttccccacaatataatttaattaggtgttatcagacctctctttagtttatgccaaagggggagggccataaacttgtatcttattacaattttcatttgtctgtatctggcagacaaataaggtggagcagctttctatagctctgttagccattcaaatttcctcattagtgaattgcttgtttgaacacttcaattttcatgctgtgtttttttttgttattttattattagaatgtaaggattcttaatatctgtgtcattattctagaaatacatattttacatattatgtataataaaatcttatatttctatattttatactttattatctaatataaatactacatattatataatataaatatacatgttacatataaatatatatgtagaccatatttatatagaaatgctatatgtgttatatatagcatagtattttattataaaatgtatgtaattatatttgaatactagttcttggtcagtgcattatatatgttataaaaatagagatatagcttatcttytatcttttttatggtgtctttttaatcagtgttttccatttgaagtctttgggtttcatcatggcatctttctctagtgatttcataaaaatatttgcccttattttcttctgaagttttagaatctttaatctgtcaggaatttttgttgttgtgagacaggggttgaattttatctttttctacttagatagggagttgtcctggcccttgtatttaattgttgaaataccctttctcctgcagtgtatgtcttcacattggttgtctatccagtccccatgtgtgtacttatatttctccctcctcagttttattccactggttctgtttgtcagtctttccaaaaccttgatgattttcttttctcaattcaactttctcatcttactttatacatgaatttctactggagtataacatatacaaagtgtgcacatcttagtgcagagcctgttgactgtgctgtgtagtcaccatccagctccagacagagcccttggcagcccagaccctcccctcagcatctcctcccaagtgagacccaaagcgrgaggttagcggattcagacatcatgcactccatgtgtctggcttctctaactcaccatacatctgtgatactcacctgctgtggtacagagtagacacttggtgtctcaatcgttctgacaatgtgaaatctttctgacaaggtgaattgcaaccctcccccattctttccccaaattatctacatgtcccttattctaaaatcatttttcagatgagcttgtcaaatttatgaaaaaagactgattgggttttttgttgaatttcgatttaatgtatagtttagtttggacaaaactgtacaaaagtacagtcattgccacataacagygtttcagtcaactactgactgcatacatgagggtggtctcctaagattataatcacatactttaactataccttttttattagatgtgttcagacacaaatacataccattgtgttagcgttgcctacagtactcggaacagtaacagtaagctgtgcaggttagatacgcaaatacataccattggttacaattgcctacagcactcagtacagtgatatgccgtgcaggttgtgggtgtgcagtgggctgtgccagctgggtgtgtgtaagtgcactctgtgatgttggcacaacatcagctaacgatgtatgtctcagaacatgtccccatggttaggagacctgagagtgtatttacgacatttggtcttcccatccacttctgtacttacatggcatgtgtcttcgctgagtgagatattcctttgccattcaatgaacttttagtatttttaaatgtaaagttcttaaaatattttattaaaattttttgaagtagcttaacatgatcaggattatttttaaattaacttctaactatttcaagatattatataattggttgttgctggcatataggcacattggtttgtattttgaccttgtgacctgtatctttgaaggaatcttatatttgttataattgcttgattggcagttctcttagattgtccatgtaaacaaatatgtcatctgcagctttcttcctttctaatgctgtatatcttaacatttgtcattgcattgagtatctagggtgttccaaatagtgttgaatcaaaggggtcaaggaaggcttcattatctatcccaagcattaagaaaatgtctttgacattttaccttgttaaaggatgattatttctgaaggattttattagataacttttattgggttaaggatgctttattcctagtttcttaaaatttaaaaaattttgaatggaccaaatcttattcttgaatctctaagatattactggactttttctccctttaatctcttagtaaagtgaattacatggagtagaaccagttttgcatttttgggatatacctttttggtcactttttgttttactgatttccctctgttatatttggttgctattattttttgagaaatggaattcccttattttcattgtgttactgtttttcagtgctagtatcraagtaatactcatctcataaagtaaattgtgtcctagactgaaaaatctaaaatccgcataggaggaaacagatgttgcttgaagctttagtaacagtgtttaagtcacctggctttagtgctgtttatgagagttggtttttgaatactgatttaactaatggttacaagtatagtcagataccattcctttcaattcaattctggcattttgtgtttttgttttttttcctaaaaatgattcatttcacttatgtcttccaattacgtttctgttgtgcgttgcagtttcttgtggttttgcatatctccgatatgttattggtatgcccctaattcatttctannnnnnnnnnnnnnnnnnnnatctttcctttctggtaattttgacagacatctttgtatttccttcatatttttaaacagtcaactctgctcatgtctgtgctctctgctgctttctggtttgttaatttctgccagtaagtctcaggctatcattttatctccaggtcagatggggctaattctctagtttgcgttttcttttaaattttgctcacactttctcattacagattgttttctacgtggtttataattttttattacatgcttgtctttgatgtctttcttttcttatgagaatcctgtggaagtcccaagyactctcattgttggaaaggttcctccaacattttataattagcaattcaaatcaatgtgttatgttagatatatgagtattttattatattaggatttgacactcatgtgggatacaggttcaggcttctatttctaatgagaggcatttgtgttttcatcmagagcctgagaaagagaggctcttctgcccgcctgcctgtggacgggttgttggcattccttttgtgcagggcaggtrtgcacagtccttgggggtgcgctgccagcacctgccccctgccctcctgtgggcagaccccaaccccagcctgctgggccctaacagacccccctgcctgccactgccrcactcagctgcctcccttgcctgctctttgccccagctctgtgctttctctgttctggcatctgggatttctccttccttcctttcacgtttactaatgcttcaaaatttgtgcctgtccctttttatttacagtatttatgcattagactgggagcagggtctgtgctgtttttacaatgtgtgctcgaaatggacatctctagactttcttctcttcttatagttttatacttgagacacttgttgactatgaagtgagagtatttaaaagtgcatatattgtcatgctgatgcgtgtaaacacactatcgtgacgatgcgtgtaaacacactgactatccacactgggttttctgggcagtacaatttcaaattttgttcctcctaagctcaggccacatgttctgatttggagttttaaagaaatggagagtgagcctggaagaatttactaaattgatcccagctttctaatgttttgctcagggcagatagcagggaagcattgcaaatagggttttggctgacaggcaggctcctgtgtgcacacacaaagcctaccccasaaaagtagagtctgcttctccraattcaggccactctctkgcagctgaagcctctgctactgctccctgtcagcagctcccagctcttacaccccaagtggcccaggcctcagctacgatgcaactcgactcagccctgttgtgtttgggggactgaggtgctggactcagggtgagacactcacacacctgccctgatttccagatcttggcctagcatgggcccctcccagcctgtgttagttttttttcacactgctgataaagacatatctgagactgggcagtttacaaaataaagaggtttaatggacttacagttccatgtggctggggaggmctcacaatcatggtggaaggcaaggaggagcaagtcccgtcttacatggatggcagcaggcaaagtgcagggaaactcccccttataaaaccaccagatcttgtgagacctattcactatcacacgaacagcatgggaaagacctgcccccatgattcaggtacctcccactggggtcttcccatgacacatgggaattgtggcagttacaattcaagaagagatttgagtggggacacagccaaaccacatcactgtgcagccagccacacacagagcattgctgaccagggatgcttgcccgggcctcagcatgcagagtttctattgaggtctcagtgtgcagccagccacacgcagagcattgctgaccagggacgctcacccrggcctcagagtgcagagtttctattgaggtctcagtgtgcagccagccacacgcagagcattgctgggcagggatgctcacctgggcctcagcatgcagagtttttaatggggtctcagtgtgcagccacacagagcattgctgaccagggacgctcgcccaggtctcagagtgcagagtttctattgaggtctcagtgtgcagccagccacacacacagcattgctgggcagggatgctcacctgggcctcagcatgcagagtttttaatggggtctcagtgtgcagccacacagagcattgctgactagggatgctcacccgggcctcagtgtgcagtttctatcgaggtctcagcgtgcagtcagccacacacacagcattgctgaccagggatgtgcacccgggtctcagagtgcagagtttctatcgaggtctcagtgtgcagccagccacacacagcattgctgaccagggatgctcacctgggcctcagcatgcagagcttctatcgaggtttcattacattggtgtgagggattgaaccattggccacaagctttaacccacccaccagccctcccctctcctgagatcagactatatcccacggctcagagcccccactcacccatcacattgttggtctttttggtgtggacagcccccgtcctgtcacctcatttgcataaacaatcaggtgtggtccgaggggcccaccacaaatgacctcactcccgtgactcaggaggctgcaaggactcaggctgcttccaggaacaggaccaaggctagccaaactccttatcacacaacatggctaaaacgacttatcattccagctaatcaccgactcgtttcttcctcattctctcgtcccacatcctcctccactgcccaggtagtcaagaagatcaccacagctccatgtgtggccctgatggctccatcaggcttggtggccaccaccaggcaccaaggctttattcgtggcccccaatggctctgtcaggcttggtggccactgccgcttaggctgacatccttcagattcatgcctctagccctaaaccattctgactccagagcaaattcttatttctctgagcacagcacctgggagacagaagttggctgattgcatcagtgagcgacttacagaaaaaaaaaattactgggtaagcacatctgaagaaacaactcattgaggtttctgataatgagactttcccttcctctgcagtaatgccttttgacaataagcttagcctattcatctctcccagcgtggtgcagcagagctcctctcctgaaaacctggaggcatggaagatgtaccgtcctccacacggtgctggacatggggccgttgtggtcctgggtttactctgctcatgtcattaagccccatctgccctgcatgtgtccctctgagtggtcagtggagccaaatgcctggtgctctgtgattttaggtctaagccattttagaatctctgcatttagcgttgtatgaattcactgctcactgcacaatgcgtcctttgctctgaattgacccagttgagattctcggtgtccagcccgagtctattgcatacggaacgtctctgtgcatcagaggcgctttttcacctgccttgggtctcttggcatctgtctctcaggcggaggagccactcactgcatccggccttcctcctgtcattttgtttgcctttgccctcctctgaactttaattctcctccaccatgagaactgaccagaacttgccccaaatgcagcacctctgctttcaaagccggggaaggaggggcaggagagggccaggggctgtgctgtctctaatgtggcctagaggtcagaggaggggccttcatcagagcatcagccaccccttcctgggcccttgcttccccacagagggcatcttgctgctcccggcgaagcaataattgctgaaaatgggaagttaattggatgtgagtgcaatgccatttggctttttgcttagccagggccaggcgtgggggcaggtttccgaaagggaagccgaagactccacacagcagctggaatgccggggcctgagcagcccccagaatggccgctcttctttctcagcagtgctggagaaaacagccaaaggtcccttgaaagtgagagctgggctgctcaccatgtccttctgcaccatgaagaagaaacaaaggagacccagagacttcagaggctcgcgggcccccggagcgccggctgcagagcagcaccgtctttgtagttttgcagcgactgtaattaatgcatcttcctgaggctgctgtaaacagcccccgcgtctgacttccgcccaccttttttactcgatgatttaaattgtttttctgactttatctgtcactttatttaccagctcttaacctttcttctttttttaaaatataaatgagtataacatccactgaagattacgatgccttctggaaagtgtggctgaggctgtcttcctggagaatatcctctgcttgccctccatttatctttttctttttttcctgaagtctaataagcattaatttcccaattcctgaatatgcctaatgattatattttttcatttaacaagtaaaaagcagcttaaagggctttctaaatctctcacttgggtacactgtattctcacagagtgacggaatttggcacaaacatattggttataaatgaatattttatgacaattaagagcatttctgtggctttattatttgttgctccaccctctggtgagacctgtctttccttcaaaaccaaatagaccccaaatgtcagatactggaaatgagtgagtacagggatgcaggaaaaaattcaggaaggtgcaaaagtcatgacctcaccattgatgtctccatcacggtgagatcgaggtcgtctgtcagatcacacagtcttccagaacagacattcagctctgtttttacattttagaaaacccaggaagactgggaaaatattaaaggccacagtggtccagtttatcagcaagtrgtgttttattcatcattcttgtccctggtttgtcaaattaaacacattatctgtggaccttcagcagatactgcagatttatcactcgaggatattattcaacgtgatgccttctcttctctttctgacttagcaacaacagtttagaaaggagaaggcttgcagagagagaaaacgagggccctgaggaagagctgtgggcctggctcatcgctgagctctggctgtgtggggccagagggtctgagatggcgcgtgcagtgcccaaggctttggcaacggagccccgcacactggcaggcttagaacagtgcaaagctctccaggccctgcaccccccagggtctgagatcaaggtcttagcggggccgtgcatctctgaaggctccagagagggtccttcctgcctcctccagcctctggtggccctgacacccctgccattcctcggcttacaggggcctccctcccacctctgctgggtcaccaggtgttctcgggaattctggcctcgccttcccactgggcacttctgtctctgtccagtgtctccttcttagggacaccagtccctggattaggagccactctgatggcctcatctttaactggcttccctcttcggagaccatttccaaatcacatcccatacacaggagctggagccaagactcagacgtgctttcctgggggacatagtccccaagcagctggctcagctctgtgctttgctgggggacatagtccccgagcagccatctcagctctgcagggggtcaggtgcttgcgcagagctgcctcatcctgcgggttctcgggtgcggtgaaggatcygtcctggggatgcaccatgccygcttctggtgaattattttctgcagtcttctacctttaagagggacctggctccagacagaaggtacaattgccctaaggaaatgaggtcaccaggcgggctctgcactctgacctggtcacagggagcacrcctggcccgtgctttccactgggaccccaggtgatgttgcttctgtccaggaaaaatgcttctaatctaacaaaatagtattagaattatcattgttattattacctgtgtatgtattttctctctacatgtctttgatgatgtcgtaaactggtagatcgagtactgtttacttacatagagcccatcctcattttatcagctgttttgcagctgagttgggagtggggaggagaagcctgtgaacgtgttatttctggttgctatgtttgctgtgtggatgggcaggacaggagcctccagcccctgtgaacatgttatttctggttgctgtgtttgctgtgtggatgggcaggacaggagcctccagcccctgtgaacgtgttatttctggttgctgtgtttgccatgtggatgggcagggccggagctcccagcccctgtgaacgtgttatttctggttactgtgtttgctgtgtggatgggcaggacaggagcctccagcccctgtgaacgtgttatttctgcttgctgtatttgctgtgtggatgggcagggccagagctcccagcccctttgaaggtgctttctggaccttctctgcttggcaaaaacagctgaaggtagaaggcggttaaaggcttttcttctatttccaaatggcatggccatacacatatctcttctttttcttcaggcggcctgcagagattaggaagcctgatgttgagaaatgtcactggtttctttggggtagaattcggaagaatgcttttagagggaaatcataggattggccttaagtttaagggacacttagaggagacagaggacaggatatgaaccccatgccctagcaagtggatacggaccccgtgccccyggcgagaggatacggaccccgtgcccccggcgagaggatacggaccccgtgcccccggcgagtggatacggaccccgtgcccccggcgagtggatacggaccccgtgcccacggcgagtggtggggaggctgccaggcaggacagaggtgtgggttcttctttgctccagagcaggggtgttcgagtctcagtggctcatgtcacaccaggtgactggagcaaaatagccccatgtgctggtttgaacatgaagacagctgattccaccaggttaaccagccttcagcctggtgatgtggtggttctggcctggccgtggtccccgccctttcagagaccctggtctcctaatgccgcaaggagaggtggcctccctccttctggtgcacgctggactctccccacgctccctgagccagcagaggctcctgagggtctgcagctgccccgccctcctgggcttcagccagtgttgccttgcgcgggacatagtagctctgggtaaagaatggcccccggtcagtgttcaaaaaaattagggccttcttcctaaggccactactgttcaaacagtgttttccttctgacagttaaatatttactttctccaggtggcgtcggttggtcagtggagtccgcctgtctccgctgggctgcgtcggttggttagtggagtccacctgtctcctccttgctcctggcttgyggttctctyctctgccgtctctggctgggccttgcaggctcyggctgcttctcctgcagttcattttgttgttctttcctctctcgtctgaaatggcctctgtcctagattcaggagggaaaggaggaaaccggtggggcctggccgctgcttctcctggccttgttcttcargctccctttgaaggtttcgagcttctgctcttgctctcctgcctcttcctccatgcctgctgcttctgcgagctgtagtttacattctggctggccgcagccgggtcctcaggacttgaggagagggtcctgtcagggccagcgttctggtggggttttcagccatgaaaatgtccagagaattttggtctgagctggagaggagacagcagcgtggatgtgacactggggagaaaaagcttgggccctgattcttgtctggccatcttggatcatagacgaattattcacaagagggtctctgcctaaaactcaccatggtggctttcttggtgtacttttcatgtctaaaatgtawgtaaagttcaaactttaaggctgcagaaggaagtgaaggcttttgatgctgtttacaaatctctggtttctgactcaagaccatgacggtatgggggaacccaggcctgaccttctcccagktttgggggagctgcctcctgcgattctccctcggtggccctgttggggtggggcccatttcctctttgaaaatgacatcccagtcatcttactttctcggctgtgaacactcacaatatgtkccacaggatgccagggctctgctccgctggagaaacctccgtcccaaactctgtcttgctttctcaatcatatttttagaaagtgaggctgggtggcttgtgggttccagaagcattgaggttgaatcacaactgtgaaaatatgggagtgaaaaacacagtggagacacaaaaggagcatcgtgtcaggatagaggattgtggagggtgcccaygtgttcccactgcagctggccccaaggttctccctaaggtttttggtcccatctctttccctctggaactcacgatttggccaagaatgagcactctcaggctgctcccaaggaggcccaataccagcccatgggggccgagagccacgtcaatccacatctgcccctcctggcatcaagggtcagccagtgccctgccttttaattttccatttatttaaacaggatcacatgatttcatttgagagtatttcctccaccacttctgagtggaagccaggagacgaggtggctttcagttccatttgacttcctgccacttacatttacctttcacgtgtctgtggaaggatgaccagggcccggcctaggcatgtgggtaaagtcctggctgtggctgggcactttccacaggggccggctctgcctggggctggggtgggtgagccctgttggttctaggaccccggacctgcctggtcagcggagatgatggaggttcggtatgggaggagcaggtgtgctgtgcccgtgaatggcagttcctgggccaaaagggtcgagtgtcacgatggtggggtcatttgaaccgtttgtcaccagcatacctagggcagtgccaactgacacagtgcccagagccgagtggctgctggaccatcactgctgtgtgtcctgtgttcacgcagccctgcagaggacagggccgtgtggtcaggcctcttgatggggcctccttgcacctgacctgtcacggtatacgtggagggcactctgccttcctcccggtgtcctgtacgtctgagtggaagtgctttgtggggtgagggcacctctgtggggctcagggggcagctttgaaacagtggccagggtgctccccacagccaggcccactgcagctccctcctgtaccgtctcacgtggaagagggtctcggttttgtctttaattggtaaaagttgttttagtgtatgattatgtaagaactatgaacacaaggaattatcttacattgtaaatatttgagtaaaaagaataatttcgatcaataagggtgcatatagcatgcatcactcagcttcgccaaaatccacgccatgctgtccggctggcatctgagggcagccttggtgcccgtcctcggccagtggaccttcccacatggatgttgtttgctttgcgttattatggtcccccccagcgagcccagcccaccagatcagaccatctcctcctgaatttttgcacaaataccttccatcatccctggtattttacctgtgaattactgttagggaaaatatatcagtagcagagatactgattctgtaatttttcctaaataggcacttactccrgatgaaaccacaaagcctaaataatacattggcatgcgaagctcaccgagctccttccctccgcgccgaccccggtttccatctaaatcgatatctgtgctgcctcgacggggcccggcatgggccgtgcttggcatacagagcagctgcacctgagcagcagctgaggggtcttagggaagccgctgccccttccaaacatgactgcctttgaagcccctattaattgtcaataacaactgctacctccattacaaaaggaattgaaagcaaaaataagacccggacaatagaacgtaaacggaagagcaaatcccactccrgattggaattgtctgccgggctcgttaatccctggcctggcgctgggagtgtgggtgccgcttttcttagggtttgctttctgatcttgtgtcaattactgcacaaagcttcacaccacacagcgaatcctttttataagtgttttagtttttgttcaatattttatgtttctgcttctaaatcttacttgccgatatccaactgataagctgagcagggaaatacaaatacaccagccatcatcccccaaggtggtcacatatgtgtgtgtttctttagcttaagtgaggttatttgatactcgtgtttgttctgtgtggagttaggccttgtcacatataagcagttgtgttcccacagggctattaaagaagtaaaccaagttggccacacaattcagcctctaaaatctgacattgttttctggggaaggcggccgtgctgggggtgccaggagagacttggggatgtcrgtatctctcagcatggccgagaacaaacacccatccagttgtatcataccatgggggcctttgtctgctttttaaaatattaacaatgtattttggatgtttaataatagagcagatgagggtacatcaactgcattgtggctttacctgccaatctagttaccaaccatcacactgacaaggaggcgcggctctcccactctgaaatgatgcctttctcttctgagctcctaaagtgcagggtgtttttcagactcaaaggtcaagtccttcttagaataggscygcatgtgtctttgtccagtgcatgtttgcctgctttcctcggggcacctgtcactgcaaagcccagctgcccgcttacccatctgagaagaaaagcttattctgacattcacaaaccacccactgcccacaatcaagcagacaaggactctgcaggccccaaaccccactcaatcttttcgtttctgttttcctttttcttttttaggtaaattttgttgcttattgaaaacttcctgtgtgtatgacatttttctaagtgcagtagcagaaagaggcagtggaaaggaattgaggtcaatgttgagagcacaactgaagttgctcatgccttatcctccctggaaagccttcatcagctcctgccaagctggccttggcccccttcctgctcctaaagcagttttctcttccattgcttgtttgtcacaaggtgtcttagtttctgccccacagatcagccccatggggtcaggagccacatcctggtggtcgtcttcttggagggcctaggatgcactcctggcttacaatgcctatgaccttgtggaggacgtgggcagcgagtgtccctagaatcacagctgcacgggtgccctgtgtgcccagggaatgcccagtgcatgtcttggcaatcattttggcatttttttcctcttaaaaatctaaatgtgtgtgtttcactagagatcttgaagttacggagggctgcagagcgattatttcagctgagtggacagctcagggaaccygtgttcttctgattgatttgcttcttggaaggaactgactgtaggtttgctgagactgaccagtcaattaagtcagcactggccatccagatgcctgggtttctgatgtgcaagtgctgaatagcagtgaggactcggaacctcaccgctctagagctttgctgggatgcactgggcatgttcacaacatcccggagctttgttggggtgcactgggcatgttcacactaccccagagctttgctggggtgtgtttggcattgtcatagaagacaaaatgaccctcacacatcaagaggaattgaaactgctgatagataccagtggttagcagctctgtttggaggtaatggtggtatctaccaaatatagaacccatgtgccaggccctgtgtgtgtgccggcatgtgtgtctgcatgtgtgtgcctgcgagtgtgtgccaggccctgtgtgtttacctgcgtgtgtgtgcctgcatgtctgtgccaggccctatgtgtttgcctgcacgtgtgtgtgcctgcatgtgtgtgcctgcttgtgtgtgcctgcatgcatgtgcatgactcaggagggactgacatgactgagtggcttgatgagggcaagggtaaggaggagatgacaaactgggcatgaagatttgtttactcatttcaagataggttaagaatgtgtgtgtctgctgaatgcaagctcagggtctctacgcaactgtcttccttagtttcaggaaatactgtagtccaggcagtgggggacaccgcaagaagggagcagaacaaggaactcgctcctcggctcttctcctttgcagtggatgggacagtgctgcagaatgtgcgtgtttgaaaacttctgcttgagttatttcaaaatatagattagagaaattttttttagagtgttaattactgcaaagaaaaatacacacagccacagtagaggccaagatgtcttcagatattgggagcagcactggccacggagtgcagccatgggagcagagcctcacctggggactgagagagcagagactcacctggggtctgagagagctgtctgtcagtgtttcccaggacacaggcctgggagcgcttacgtggtgagctcctcctttagcgagatgttggagaaataaaccaggattggcttctggctactccttgtcgacatgggcttaggtgaattcattaaagtggttttctgtgctaaattgttgagagttttccaagatgaatgagtttaaaacttgttaataatgagtcacaagaaaacagccaccgttctgctttgtgccgtgatttttgtttatcagggataaatgcacactgaaaacaaagccctttcccatttcccattgaggactaaacaggagtgcacagagttcagactcaccagggcgaccctgctcttgccatcccctgcagaacaaggtgaaattgggcaaccgtggagggaaacgctactcttgatcattgaggtttctaaggtccagggatattgtcttctttttcttcctatttttcaagtaacccaacagtgccctgctccaggggtgctcagaacgcattccagactcatggcggaagcctccgtgggggaaagccttctggcgtgggcagcctgatgctttgctgcatcattaaaagccagaggctgccccagacagagtgcccaggtgcctgggccttggctatgaacacattacrggctgccccagacagagtgcccgggtgccggggccttggctatgaacacattacgggctgccccagacagagtgcccgggtgccggggccttggctatgaacacattacgggctgccccagacagagtgcccgggtgccggggccttggctatgaacacattacgggctgccccagagtgcccaggtgccggggccttggctgtgaacacatcatgggctgcgctggtcttccctcagtaatcaccgtgggaaatcatggaactggagagtgggggtgcttccttgggccctcattaaaggatgacctgaagtctcgtggtggaggccgtcaggaaggatggaaaacgctcggaacygtgtaggaaacggagtcatcatgctgtagggtcagcamtggggaaagtaaaagcactcaggtgatgccccttgagtttcacaatttaaattcatccttgaatgtctcctctcaccatgtctgtggaagctgctgacaagcagaggatgcacttggctgggaaaacctttcctaccaggacaagcccaagaccgaagcttctggggacctgtcacccatctggcccttcagggaggaggccagctggagtgtggggtctcgcctcatggtggatgggcgaggctgcccggctcagccagggcagtagcagcagccatttctctgcctctccacagggaccttgtgaggtcacctcattttttattttaatacttactaggacagaggtgggtagattctaacccatggacagccccacctgttttagtaaataaagttttattgaaactagggttggccgatgtagtggtcttttctggtggactaaaatgctacagcctgggcagcttcagcaacaggagttcatcctctccccactatggaggctggacatcagagatcgaggtggggcagggctgctcctcccgaggcccctctccttggttggcaggctggacatcagagatcaggatgtgggcagggctggctcttccagaggcctctatccttggctggcgggcagcgccttctggctgtgtcctcacagtgctgtccttctgcacccatctctcggggggagatttatattctgtgctaattaccratatattcccttctttttaaaatgatatcctctgtgtgtgtgcgtgtgcgtgggtgcatacacacacatttatgtatctatttaggtatttggtttttgccggcatcactgatgaagtttctcatggtcttgtcctgaattagaaaagcattatatgcattggtcattatcttccatgtttcctccctcttacctgctgctttcactcaaggcttttgaacttgttttcccttataattactgtggcttgaatagcatccaattctttcctaatacctgctgtgttctaacaaagcaaatataggcattagaaccttagaaaccagaggatgtcaacaaattggaggaaattcagagaaaagcaacataaatgattaagagactgaaggatttgtttgtgagaaaagtggaaaggaactaagtgtgtttgtcttggtaaagcagcaactaaggcagggcaataaatgcctttaagaattttaagtatagaaatctcaaggagagggaattatttttagggtggtagagggaatttaattaccttaagcaaaaaccgtctgacccgatgtccgtctaggaacagcctcctctatagagggggctccggctgtcgggggagcctgagtgaggacggcatccacacttccggcaggaccagggccttggaagaagaaggttattgcagtgatcccagtggctcaggcttcttccctttttattcagcaaaacacaactcctgtgcactcccttagacttgacacaggatccctacttttgtctttcttacctattccgtttctgtatcagtttctaccataatcattgggtgttggctggtgggctttgggagctgagacagccacgtcagaggaggagcacatggtgcattttacccccaacatggtgggcaaggctgccccagcccctgactgcttctgccctgacggcttcaccatgaccccgggccggcctctcctctccgcacccactatcaagcccacagtgacctcgggacgtaggatgcaggccaaaccccacttctgtgccctcgcccctccctctcctcttgtccctcacgttccccgcaacccagagctgcaggtggcctctgcccaggcatcacctgttcctgggacaccccctcaccccctcatctctgagagctcagttcaggcaaagcccactcactgtaagaagtctttctgcgtctctacccagatggctgcacaaggccaccctccctggagctcatgtatgtgtagtgttggctgaaggaggtaagttgcagtagctgagaagcacaggtgtaactcacagagccacagtgataatgacagtggcagcaataacgggcagcactggggctggggtcaccccacctgggctctggccatcacacagatgctcctgagttcaaaccatgctcaacaaggacacagggccccagcttgggctctcaccaagaggatgagctgcagtgcagaagcctcagggctgggcattgaatctgggtcctggatggccggtgtggtttggagcaggaccgcggccaatggctggacctgaggagcagggtctgggatccagggatgtctggcraagctgagggactggtaaaacagtggaaaaccgtgtcctgcggatgccgggggccgctgtgctgtgtctgtgcggccccagccacaccaaggccgagctgtggcctcaagaccgagcacagggtccgtttcatgctgcgcggctcccccggcattgccaggcacagccaggcctgcagatgtggggtccctgagaccaggtgggacttggrggggacacagcccgctcaccatcttccactgaacactaactctacagcctggtttgctcaatataggtcttgtctatgatgggacctcaaaaaatcctgctgatttaaaataatttaagcgccctctttcattctttgaattttttagaagaaagatactaaggaaggaaaagaagtaattgcacaaataaaaaacagttaatcacgaggccttgtgggcatcctgtgcagccccatccctggcctctaccgcgctgtctgacacggtcactccagctcacgtccttgtagcyacccttaaagagaggcggcgtcagaaacaccacggcctctgccccctccttctatcgcatgtcctatccatgtgctatttaattacatgccgattgatttagcatatatttgttcattggaaataatgcttgaaacaaaataaatatcatttggtgacaaaacrcactctattacagaaacagccccaggatcggggagrcccctgcagctgtggtctgagtggcattttgccagtgctgggagcccgtggtgggaggatgggcctgcgtgagcccttcggtggtccggctgcaagtgcttccgtgggggatccagacccagtacagttacatggtatctcatgctagcgtgggtcacgttagagtgagtttctacttcctaatgttaatgaattaatttcactctgtttatactttcttatattctctttttttttttttttttttttttttgkttttgaaacaaagtctccctcttgtctgccaggctggagtgcagtcgcatgatctcggctcactgcaacctctgcccctgggttcaaatgattctcctgcctcagcctcccaagtagctgggattacaggcacctaccacgacgcccagctaatttttgtatttttagtagagacagggttttaccatgttggccaggctggtctcaaactcctgatctcaggtgatcctcccgcctcagcctcccaaagtgctgggattacaggagtgagccactgtgcctggcctactttcttatattcttaaagagaaacaaactgaacgtttggttaggaaccgtctctaccacatacggtaacagtacaccgaggcagccactgtgggacaagagatccatttcaagccgagatgattttccttgtagaggcctcattttctgaaacaaatttcaaagttaagtgcacgtcactagtataggctaaaaatgtgaagctcccagaagttagcatttccaggcagatccagcttcacggttttctacgtcacaaacagggatktatatgctcccggttataaattccatcagagcatgcacgctacgcctgtcttctctggccaccttagccgtgtgttagaaacatcatacaggcaagagccttttccttctgcagacagcgtcctgtcctgttgtgctaatttgtatggccagcggcgcctgtgaacaagcacacagactgttccagttacccaccacttcagcagcgcatgtggcctagctccagctccacacgttccttgaagaggaatcaggctggtccttttaaattcccttccctagccatttagaagtccgcaacacataccccatcttggctcagaatctctgggaactttcaaacccactactcgcttggccccagaaactgtgaggtgcagggacacatggaatccgagagtgttcacaacactggggagtgcacatccaggccccagcccacagtgatgggctcggaggctcttctgaccatctctgagcagaggcttccattggaactcccggggctgactgcaatgcaaaattaaaagaaggggaccccgatgggcacagcctcaggtggcttctgtctcggaagctccttgtgcgtgtgtgaaatcctgaggtgtgagttgtggagccgtgcagagtcctgcgtccttctgtccctgctggccgcccagccctggctgggtgctcctcctttgtagcaccccagacccctctgacaagggtccccacgtgggctgctgctggggagtcagtcattccctcctgttcccagccctgttctcggctgctgagttagtcaacgtcagcatcaatgctgaaactgtgtggttaacatagaaatgaggaaaaagacataaattctcatggggcattttgaaagctgacctcaccccttaaagtagccacaccccatttcagaactgcctctgctagttcaggcctggactccctgcacacaggtgctcctgggcacccctctctgcccccaagcactgggatggagcctggagcctagacccttctccctgctcctgggcctcatcctcccctccccagggaggggctgggcactgggaacctcaggagcactggactccctgggaagcctctctctagtgattccagcggggcctctttgatgttcctagctgggaaagccaaggtctataattaccatggccctttcttctgaaacaagctccttcattttgagccactcttgtcagcatgtgctggcgttcatttgcaaatgcaccttgctatcgttttaaagcaaaaaatgcatttcaagaagcaccactgggccctttgccatggcgtttgttaacgytattaatctgatttaaatgaaaattatcctttatattgcttcccacataggcacactttttttctctttaaaattggaaggttataccaaacgcaatgttttcctttcctgcaaggatgtgtggggctgttttaatacagattagtgagagtgcagcagcagggcactgtaggtggtgaagcccggttatcatgtgtatgattagtttcaccttgtagctatgtctctgaaaatgcaattaacagtttcatattcagcgtagccagcttttattcctgccgcatggtgtgcaacatttgcatcataaaaaaaacctaattggtaaacacggtcttgccagcttctctgcgatccacccaattctctccacgttaattggctcagcttcagcacacgctggatggaatttcaaaggacgccgcagattagagagctggcaagcacttgtgtttcacggaactgactccaaggagactcggggaaaaatattttaaattaatgccaattgcaggcgacttgcttgtccaattgttgccatggagaccgttgggtctgctaatctgatgggtgtgtgtgtatttattgggatccatctctaatgaccttcagagaggaagtcagccatgctgggctccgcgcctcggacagggaggcccctgagtggccccttctcgactcggcccttctctggtgactttcttacactcacagcccactccccctcgcccttcagccaggcgcgtctgtgctgtgggcccggcggggcacaggacggggtctaaacacacacaggccacgcaaggcatctgtggcttgtgaagtgtgacactctgcccgtgtccgtggggaaagtcatccggacctcccgagccctgcccatcctccccacctcccttgtatgagagactcggaatcatcagggggctcctgaaatcggaagcatcgttttttctctgagaggcatccgtgttgatttgctgattacgagtctgaatgagagttcttgggagtggctcttattccctgaacgaggaaaaacagcgggtgtcaggccatgcactgtgcgtgttttccaccgaggcccccagaacctgaaaaggccacgcaggtgacacactgggaccccacagccgtccctgccacgtgtgaggaaagacatgaaacttccccagggacgtggctgaggctttcttagcggaagctgacccttttgttccccctcctcctcgatcgcggcttccgtgtctatttttgtcttaattactaggctgtagtgaatggatgtgtttcccttagtgttggacctgggaccattagacaattgtaatagacagacatgtttgtgatttgttttgaactcctaataatagctggttgcttaattgcagaaaataggaagaaagacctcgtacgttctctgctactggcaaaaatcagttgtctttagttaaaaattaacaatatgaactgctggtgagtaaagagaaagggctctgctttcccctgaaagtggattccagatgcacatacaggggtgaggggcgggggcggtgaggacctttctgtcttcctcccacccctccctctatctccctctctccctctctccctctcttcctctctctctctctctcaccacccctcctctcactttttccctctctctccccatctcttctctatttgtcacacattaactaaaaagacctcagagtttttaatcggtagacaggggatttgttcattttaggttaaaaacaaaatgaacaatcagagaacaagtggggaagagggaactaaaggtataatggcttagagaagttcaaagatcaacaaccaaatcactagattcaaagattcaacgtggagtagaaatgaggcacagactggcactctgcagtgctcatgaagaaaggtcagctgaccgcctagaccccctgggtatctggagctgaattgtttycctctgctctatctgagcctctcatttcagcaacccacttttatctgagggatttgcaagatacaagggaagaaaaagagagacaaatgagagagcaaaaagggaaaagatgatattcrggagaagttcttattctcttaaaaattaggaaatgaaagtaagcttttgcactaaaaatacttsataaaaacaatcaaatcttttttgaaacaagaggaaagacagatggagataggtrtaggtgggggatggatggatgaatgaacaggtgaatgggtgggtagatggatggatgtgtggtggatggatgtgtgggtatatggacgggtggatggatgaatgtgtggagggatggttggttgggtgagtagatgaatgggtgaagagatggctggctggctggccggatgggtggatggatggatgaatggagggacagagggagaaatggatgggtaaatagatggatggatgatgaatgatggatgatggatatggataggtgggtggatggatgagggatgggtggaaggaggaatgaacgggtgaatgggtgaaaagatggctggcttcctgaatggatgggtaggtggatggatagatgggtagttggaaagatgcgtggatggagggatggatgactggatgaacaagtgaattgtttgatggatgggtagatggatggagggatggatgaatggatgagcaggtggattgtttgatgaatgggtggatggatggacgaacaaacaggtaaagtgatggatgtatgggtgtgtgggtagatggatgctgaatgatggatgagggatggatgggtggatggatgctggttgatgaatgcatagatgagtgaatagatgggtggatggagggatggatggatggacaggtgaatgggtgaatagatgggtggctggctggatggatgcatagacaaatgacggatggggtagatggatggatgaataggtgagttggtggatggatgaatgggtgggtgattggatggatggatagagggatagatggatggatgaacaggtaaactggtgggtggatgcaaggatgggtgggtgagtgggtgggtgggtggatggatgggtggctggctggatggatgcatagacaaatgatggatggggtagatggatggatgaataggtgagttggtggatggatgaatgggtgggtgattggatggatggatagagggatagatggatggatgaacaggtaaactggtgggtggatgcaaggatgggtgggtgagtgggtgggtgggtgggtggatggatggatgggtaggtgggtgagtgggtgggtggatggatggggtgggtgggtgaatggatggataggtggatgagtggatggatggatgggcgggtgggtggatgagtgggtggctggctggatggatggatgggtgggtgggtgaatggatggagagatggatgggtaaatagacagatgatgaatgatggatgatagatggattgatagatgtatgatggatggatagatgggtgaatgaatggatagatgaacaagtgaattggtagattaatgtatgtttggatagatggtaggtcaatagatagagggatggatggatgaacagatgaattggaggatggatagatatatggatgggtagatgtgtgggtggatgggtggatggaaggaaggaaggaaggcaggctggagggatggatggagaaatggatggatgaatggaaggatgtgtaggtggatgwtggatggatatatagatgaatggtttgctggagaatattcagcaattgcaatagctctgattaatgaacactctcttggaaacttgccaagtctgtgcagggagctgcctggctaagcaggaaaagaaggcacagggccatgattctgaagtggaattcaaggaacccagtatctccctcaaggagcctgctcttcagcttatggaagccctcctaagcttgagggggtaacattaacttttctcctttatggttgattttccttcagattcttacaggtgttcactggccttacgagtcatatatgagaggacaaacatggaagtgcttgryatcccgyctgtgggtggaaggatgggcacatgaacttttctaaatctctacttctgtctgaccacctccactctccatggagatgtggctgagcctaaggtctactttcctcttctwctggagagatagaactgagggtttgatttgggtcacagtcacccctacttggagtaaaatctgcatttgccagctccctttcatctaggtgtggccagtggatctcagctagaaggttaggtatgtgcctttgctccttcatttctctttctcatccctgctcttggaatgcagatgtgatggccggagctgatgctacaccatggtccaagaggtgacctgggaatttcaagaggggagaaaggagggcttcatggatgagtccccatattagccccgacctgcctgctttcacatttttatatgagaaacaaatgtaccatgttcttcaagcggtggtaataagagctggtgccagcagaggcagcagtccagggccactgcccrtgcctccgtacccactccaagtcaatcactggacatactttttaacaatcttctttctacgctttgtgaattttggaaatkcttccatacagatttgttactccttactttaaaatgttcttctgtggcttactaaacactatggattttttctttgaaatatttgccgtctgagtgatgtaagcttgctggagtcagtctcaccgtgatgtggtgtgtaaagccagcgtcgtgtcatctatgtatcagcccccggcagttcccccttcattccctaaccttttacctattcacgcactcactgagcagattgttttaaacatctgcttccgaaaggcacgtgtcagacactaagaacagtgcacaaagatgtgtggttcttgcccccracacgtgggactctctcagccaaggagtgggagggagcagttatccaacaatttcaggacgaatggctctcctacaaactcgggatcggsgcagcttcatccacattcagaaaaggawgctcttctcaccsaagttgattctgaagtctttggtgagttatggaatatttgatctcttattgttgtagtttttcaaccaaaaaaagaaagaaaccatgatttgaccaagaaagaactgtggggaaaaagcacctcagtgtaaaataacgatctatgaccaactaatccagctggattttttctgagtaagattgttctttttctctttttaaaaacaaaactcatctcgcatatatctgctctcactttctctgtgggtccgagggaactcctctgtgagacagaaaattagatgacagttttttcaaaccccttgtccccgattattagtttgtaggataagttcccaaaaaccacagaggggacaaaatataargtgtagtttcctactttcattttcactttcagtgttatataattttatatcytcctttgcttatagctccttaagaacctaagcatcatgatatgttcttaatttgtaccattttctaycacttaatatggtgatcgtcggtgacgatggtctgacggtttgggggtttcttttaaacatgtgctccctcttctggttgaatggatgcttcaaactggaatgaaatcaaacacctgtkyatcttttgtgcatctttgattcaggccattggtatttgttaaaatcataagggattttgaaacaaagatgatagagaagaggcctctaccaacttttaacaatcaccgggagacatagactctggcatgctcttttgtaaatttccccttctttctatgttgtgagaagacgggctgatgtgaaaaactttcacagcatcaaacaggcacatctgatgtctttagcaatgacgtacagacccaggtggggttttgtgtgggtaaaatcaccgcagagatcctagcagagaccactctgtcatttgcacaccttcctgtcatttgcacacctttgtggtgtttgctgggatctctgtgcaaggtgcaaggtgacagtcctatttcaggattctgtctgtgtttacaaactggtaacttctaaaaccttctccgtggaggcgattgttattctaagtggaaagatcttgttaaaatggggctcttcctcccctgcccacctgggaccatctggagtggggggagcagacccactggtctttgcagcatctgaggtgctccatggggggcccaaggcctcactgaaatttaaaggaggagtcttagtcatcaggaataaattaacttttgtttactgtgtgtaaggcagcagagaaataaacaatactttttttaaaaatagactttttaaagtatataaacttctcatactggtgttatgtgggtaagtttaagttatcctgaaaatatatttatttggaataactttaactggtgctatataaatggggtgctactgtatcttccttaaaacttgaatttttttccatagtttctcatagtttcaagatttcttcattgcctgttagcctaaatgcacagtgggcaggacaaaacagaactgatgtttgtagaagtagctggtcagtggtgtttctgaggttttgagtaaatccatccatcttggaattcttactttttcaagtgtagaaatgatgtagtgtgtaccccactgggaaccacccaatgctgttaacacacytttaaacacaggttatttgtgtgtctgtgggttcactctctagatgtctctgtagcacctacaaygtctgaggcctgaagtaggtgctgagctggtggatgggtgagcagagraaggaaaggacggacctggaggatcctggccccccaggatctcgtggtagtggaggaaaatgaactccgtcctcccgtgttgaggctttaccttgtgctgagcttgctgagggctgctggggatgccggagtaagcagggcagttcacacaggcccctgcctcctccacaaggacagggacaagatgaagtgctctacggggtcctgcaggggcatggctggaagtgagggtggagggtctggggcaggcaaaggccagcctggtcttgaaggatgggygggagacagtgcctactcagtgggtttggctggtgcccatggtggggcaggatggcatggggaattctgggaatggcgtggcrtagatcagtgatgatgagtgtggaaatccaagagtttcaagtgtgcagtgagtgtgtcattagcaatgctcatagatccaaatcagaaatttaaatgcttggttggtgttacctcgtgtgctgtttccaacaaagctcaaagattgatctctttatcatgtgctatayacccagaaagagctgygcccaggcaggaaggaggtttggaactcccaggataagctttgctttttggccagaatttaaatgtgtccttatactcagcttgatgtcgtggtttttatattaagtgggaaaattttactcatctaagatttttgattaagattatccaattattaagaatcctggccttatcattggaaacattttatctattatatttttaatatgctgttatttacaaatcacatataccaacatttctctcatttgcgggttctgcttgtacatgctgaatcggcttcatttgcatttaaaataagacactatctttcccatggataagaacaagttgctatgtagaatgaagacttcttttgggaaattcttggcaaagaacctagctgagtggtgacggttaataaatagcaygtattgtgtataatcgtgcctcagaactgcttgcatttgaattgggtggaagcagatttgatcattgatcagagcgttttcaagtccgacctggagagtgagatggtgaaatgtctgaagcgtcgccttgtgcatgggaacctttgcaggttcactgagggggtcggtcacgggcaccaggtggggcctcctggggctctgttcgtttggacaaatgagaagaattcctgctatgcctggtggaactgatcacataggaagctctgtgagtgcagtgacctcggggaagtgcagggagtgcggggagctagaggcaggaagagcatcttggaaacaaaggtgaaaggagaaagcctgtgtctcatttcagaagaagtctgagtatatcaacgtgataaaattgaacagtaaacatttactcaccacatttagtagcatatgtacttagtaaaactttttaaaaaacaaacttacaatgactagaccatgagaaagacagacacgtgcgtggaagagaagatagaaagaaaacggtgatactagagtcactgaaattctaaacattcgttagaggcccgcatgcgccaagcgctgtgtgaagataaatcacaacgtggccctgaaggtttaaggccccatggagacacgtcactgctgcctgctggtggggggcaggctgctgcttttggaatgacttcctttattgttcaggtgcaatttgtaaaataaataagaatcagtggaagacaaaaatatgaaataaatgctaagctgctctttgatagtgagaaagcacctgagggtgtttccgccgtgtaagccgccaccacgcgcgcgggacaggttcatctgtttatgaggaaggacagaactgagttgaaatgcacagacctggcggggagcccccrcggccttctctgtaaacaaagccctgcgttttggtgtctcactcctgttttctttctcctgaaaatgaaaataagaatgggcaattattccatattttcccatcatgcaatcagtagaaattttggtgggtgtaatcattgattcatggatccgttcattcctcagaacccatcaggcagtgtgtatacacatgcccacacacatacacgtgcaatgcacaccccacacacagcacacccacacactcacacatgtgtacatgtacacacccacacacacagcacacccccacacacagcacacccacacccacacacagcacacccacacacagcacacttccacacacacccacacccccacacacagcacacacactcacacgtgcacatgtacataccccacatatacacaaagcacacccacctacacacccccacccccacacacagcacagccacacacaccctcacacacgtgcaatgcacacaaccagatacatacacacatgtgcacatgcatgcatccacacacatgcagcacacacacacccacacacccccacatgtatatacccacacacatacagcacacccacccacacacagccacacacagcacaccctcacacatagcacagccacacacaccctcacacacatgcaatgcacacacccagatacatacacacacatgcacgtgcacacagcatagggaccaggctgactgtgatacttttctttctagccccttcctgtccccttctgtgtcttcatgccttcatcagatgcacctggcgcttcctccacagcagggccacatctcatcaccacyggccatcgtccgctctctgctccctgtgggaggtgccctgtgaggccccactgccctccgtagtccctgcgtctgggtcccctccatcactgtcacaccctgtgatcactctccccttgtcctctctccttgatgtggccttggtgttgggtgggctcaggtgaggtttacgagaagcaaaggaaatgttagggccaggacacctcctgcctctgatccctcgtcccctgcttacccttcctgcccacccccagcaccagccacaccccgcactgccgcagctccacctgggatgggctgacgtgtgttccccaagttcacctgggaagcgccaacacccggggccgcataaggcgactgtatttggagaaagtgtctttcaggaggcgattgaggttatgtgaggtcgtggggtgggcctggctccagcaggactggtgtccttgaaagaagagacactggagaagaagccacgtgaggacacaggaggagacggccgccygccagcctgcgcagtctcaggagaaaccgaagcccggacctcagacttcagcccccagaacygtgacggagtacatttctgttgtttgagccgctcaggctgtgaggcttgttagggcagccctagggagactagcaggcttcccgccagaggaccacacaggaggccctcctggtccaaaatgtcatgaccgcatgatggagctggggtgtccatggggtttcctgtctttgagacatgatgcgttacaggtttacttttggaaatgtgggtacagccagggtggccccagtcagacccaaacaagtctcttggcctaagggaccctgggcctaycttcctctgagtgacaaggacactcagcgtgcacagccacaccaggtggctcccaagccctggcatctatctccataggggtgggatggcccttaaggaakccattgccgtccacagctgcaaagaaatgaggttgtggaaatggcaagtgagtgataagtgtgtctgcatcccgggcggctcttccctcgccagatctttgcctggcgctgggactcacccttgctgggactcaccgcaggtgtccagcaagcttgtgaggctcaggatggcaggaggtcagctgtgtttctgggttgtcagggagatgttctggatgccaaaagaaggctccagggccagaccaggctggcactgaactgtaccagcatggaggagcaaacatgatttggactttccttggaaaagttggtaaaaatcgatggagtctttgcatttccattcatgctgcctataggatctgtctctctaaaaaggaaaagggatgtgaactcagtaattccacgaggaacacagtgttggctgctttcttagggtgtcacatctgcaaaactccgtaagttggttgcaggtgcctgtgctgccccaggagaggcaggaggaaggggcagcaggtgccccaagaagggagaggttcacagcagaagccttggtgaaaaggagctttgaacatgtttatttgggcagtggctgctgctagtaccacmtttccatcagatttgacatgagcattccaaagaaattcagatgcaggcagaaacccctcagcctctaaggttttactttccttcatgatcccatagagttaaaaggagccgtgcagacttcccactctgagtgcactagagacacgcatttgcacacacgtgcattttagacgcagtgtactgaatactaacagcatccacgtaagatgtgtgcctcagcgtgcatgaggacattgctgtgggaaaccacggtgggcccttcctgtctcttctggggagaacccctcatgggccacgagcaccacctgagccttctccagctgtgcagtgactgaccagaggcctcaccgcagatgcttcctgccctgcacctccccctgcaccccatcttccagctctctaagacaacgtggacagcaaaacgctgcagctaatcttattttgtgcatatcaagtgggctttactagcccctactttttaaactctagccagtgttagattagtgaattccaaaccagcttaggtcttttgcttagtgacctttctctttgcatttttttttaaagaaatcagcgaaagccaatagtaacctttccatattcgccaccataagctgcacccaccttaagagtgaccacgactgggtgcggtggctcacgcctgtaatcccagcactttgggaggctgagttgagcggatcacatgaggtcgggagttcgagaccagcctgaccaacatggagaaaccccatctctactaaaaatacaaaattcgccaagtgtggtggctcacgcctgtaatcccagctactcggcagactgaggcaggagaattgcttgaatccaggaggtggaggttgtggtgagccgagatcacaccattgcactccagcctgggcaacaagagcaagactccgtctcgaaaaaaaaaaaaaaaatagtggccacacagctcagaccgcaggtacttcatgggtgccaggccgattttctcaagccggaaattctgaggcttgtgaggaaagggggaggtgtgtgtttctcccgcttccatcttactgtttatgtatctattagcatttagcatttctacaacacacttcataccctaagaggttttaaaatcagccatcataaacattaccattatcatgagaggaacagaaacaagcattttaaagatgaaatttggcaaagtagaagaagattttctaaaaccattctttaaaaatgaactcagagtcacagaagtgaaatttacatgcatttgcttgaaggagatggtttgtaaaacctctgggaatcaaatactgtcatgaattttttaaaaaatgaaaaatttaggaagagcagagtatagtgggatcaatattttccatataagcacacatagcattatcagatcctgaaaatgaaactgtcaggaaagtgataagatgtgcctctttctgttatctcagagaaatataacgtaaacaagcagcaaacccagtgaaaaaggattgttttgaattactttttttagagtccactaaggtgttatttatagcaaaggaatgcatgcagttctttaaaaatagatgctggttaattttttaatctgctggttttttaaatataaaaaacctaaaactagaaccaccacccagctgtggacacacaggaagcatctgggaggggttaggaataaaattcgggtgccattgagggtagctctgagtcctggggccacacaggaagtgggcggttccctctctcatcctctgggatgggaggaggctaggatggcccctagaccctgcctacttctctcaggcagaaacatcatgtgaagtctttttggtgataaaacccattctttactcccaaattgggcactggaagcattaacagagcaatttttgcttttcctgtcaccttagagagtcaccaagttttccaaacgaggagccgaaaagcagccatgggggctgctcccatccgagagccggagtcttctggaactcagtgaaatgaaacactggccgggctcccaaggtgctgacacgtttcctatactgctatgacagtagcaaatgatttttcgtagcttgtggaattgtaaatgaagtttgctgattaagtcggcaacagtgatgaaattaatagatgctctcagagtcattagacaagctattctttaaaaaaagcagaggcccgttttaccactggccttggcgtgttgggaggtgccgccaagcccatgtgagaagctcgccaccaccaagaaacctggatcccgccaaccgcagggctggagcccggatggcgtgcttccccacccctgtcagtcagctcgggtggccacggtgaagccccacaggtggggcagacatccatcctctgcagtccccaaggcctgggtctgggacgcctgtgggcagggcttgttcctggggccgcattccctggctcacggtggctgcgtcgtggccacgtcctcaggggctgtccttctgtgtasatgcaggctgtgtgtctcttcctcttcctgaagaacacaggtcctattggattggggccccctcaggacctcatttttttttttttttttttttgagacggagtctcgctgtgtctcccaggttggagtgcagtggcgsgatctcggctcactgcaagctccgcctcccvggttcatgccattctcctgcctcagcctcccaagtagctgggactacaggcgcccgccaacacgcccggctaattttttgtatttttagtagaaacggggtttcaccgtgttagccaagatggtctcgatctcctgacctcgtgatccgcccgtctcggcctcccaaagtgctgggattacaggcgtgagccaccgcgcccggccttacctttacctctttagaggccctgtccccaagtacagtcacatgagggttcagggcttcccctgtggattttgggggacacaggtcagctcatgacagaagccaaacatctcctgccctctcctgtgctctttcctcctcccctggatccaagcggcctgtagcagacccccacttgtgctgccaaaccccggccaggaccagggcactccatctcctgccaggagttccacagatgagatccagcccagccgtgtccacgccagggtggtccaggccagctccccacctcacggggcttgttgaagagccttgtgtggctcctgctccgtggacctgctgagctttgaggcagccgggagttcctccccggcaagtccatttctctcgctgcagctgacctgcccgaaacgtcctcagatctgcttccagggagcaggccccggccccaggattcctggacatttcccaggctccctgacccccgtggtgtccttcacatcctcctcttcacccctcagatgaaccctaagctccagggagggaggggcgcagtgggagcttttgttttctccctcatccacacctgcggcatttggccccgttgttccttcactgcatgctggccaggttgccatccggctcacgaggcgccgtccactgtactggggattcgggcaacaaaagtgactctccccaccagaggttttagtttacaacatttcccctcaccgtgaaastggaagctttttaggggccgaaactcwgtggcactaatttttcatatgaccttctcccaaaacacgtccctgcctctctcatcctccgtagaaccaactcttaataaaggggtgagtgagtgaccatccagagcacagcctctgcagggggcgggtctctaaggcagcactcgcctgaygaccacgccgtgtttcccgcgggggctgcttgcctcaagcccccgctttgcacctcagttcccataaaagggcatttggtggtgagatgtggctcccgcctcggtggggggcagagctggtcagtgctggccatgggggccaccccatgtcacccgaggtgactccaagggaagaggcactaagtgccatttctgaatctgaagctggcggccatcgtctccactgaaacaacgtgatcccaggacctggagacagcttggccagcttccggctggaggaggatctccaggagtcccagtgcagcagcgggtgcctccggatgacctcaaatacgatgcaaccccatagtttactgagcacctcctcggtgcctggcacggttccgggtgagggcacaacagccagtcacgcagactcatgttcctggaaggccagcgggcccatgcctgctgtttgtgtataaacagatgaaaagtgtttgctaatctccctgaggcagtgccgggctctcagcacggattgggagttggcatcatgacagggcggtcctgaggctgctgatggttttcggccgttttaccatctactacactgcctgcgtctgtctgcatggtgggagygcccgtgaggctgaagtgccgccctcccggtcctcaggtycccctgctgtgcaygtccccagccgtggactcaggccctgtggtcctgaggggtcatgggtataggaggtaggtttggaatcagctgtacctgcttccagattctggctctggcttttgctgctgcctgaactttggcaaattatttaaggctccagcttcccattctttgcacgtgaactctacctctgggttgctgtgagtgtggagtgtggtcccctctgtgacatgcacagccaagagcaggcctgtgggagaaggccctctgctctctacctgtggccgaacctcagccccaccctgtaccccacctacggccagatcccagcccccacccttcaccccgcctgcggcccgaccccagccccacgttgcaccagacctgcggccaaaccccagccccaccttgcaccccacctgcggccaaaccccagcccccaccctgcaccccacctgcggccagacaccagccccaccctgctccccacctgcggtcaaaccccagcccccaccatgcaccccacctgcggccaaaccccaccccccaccctgcaccccacctgtggccagacaccagccccaccctgctccccacctgcggccaaaccccagcccccaccctgcaccccacctgcggccaaaccccagcccccaccctgcaccccacttgcggccagacaccagccccaccctgctccccacctgcggccaaaccccagcccccaccctgcwccccacctgcggccgaacaccagcccccaccctgcaccccacctgcggccagaccccagccccaccctgctccccacctgcggccggacaccagcccccaccctgcaccccaacttcagtcatgcttcccagtagacctcaaagccgaaatgtcaggcagcttcctgttaagaaataaagaggaggaggaagaaggaaaggtgtgcagggcgttagtggtgaccaggtgctttcatcccggcctctcsacggctttctcgtgttgggtgattccagctgagaaccctctggcctgaaaccaagcatgcatggccctggggcttttaaacccttctcttacgggccttggcgattgtttttgaagtgatcactttaaccttttgttttaatcctctggttattcccctgactggggaatgcaacctgagaagcatcctttggcaaaagagaagttttattagtgaggcaagcagttaattaaaaaaataaaaactaggttgggcaaggtgactcatgcctgtaatcccagcacttcgggaggccaaggcgggtggatcatttgaggtcaggagttcaagaccagcctggccaacatggtgaagccccatccctactaaaaatacagaaattagccgggcatggtggcactcacctgtaatcccagcttctcgcgaggctgaggcatcagaatcacttgaacctgggaggtggaggttgcagtgagctgagatcctgccattgcactccagcctgggtgacacagtgagactctgactcaaaaaataataatgaaaaataaaaaaaaaaagtaaaaataaaaaccagaggccagagttcatcaggtaaacatctgagatcaagtgtggtatgtcggagctgcraaccccagtctgcaccccacctttgagtggctgagatttaataaagtgcagtgaagtctcagacccacacccccaccttgatgtttccagttacggaactcgttatcaggtgggccagggactcgcggagaacagctgcagacagcacctcttccccctggtctygtcgtgtggacgagtctcccgatgacaggtttcctggaggcctcatctccggtgggtgccagcaagtccagccagggagcaggtcccagaactcaggttcccaggccaagctttcccctgcctgtgttggtggaawacgcagggtaagtgggcaagagtgagagaacacaaaagccttcagccgggtctttattgggctgctttatctttgtgtagctccgtggcacgtgaaaacgagagcgtctgaggttggtgagaaattcgggcagcacacggtgctcagtcaccatgaaactaatttcacattgggagctgagttgtgaaaacggttttgctgtttatttaaaggagatgagagtggacaagccgactagaaccccctgatggcttgagcgagggagaaggagggtttgtgttcaggcaactaaatctgccttctcttcttttaggctggaaataaaagccggtcagtgcaggggtgtgaggggctggctgtgggttctctggcaygaggctcacgtttacaggaggtcctcttggtgggcatagtgtaggggccagggcrgacccctacggccgctcrgaggaacagccaggatcggacccgggaccgccccacactgtcagcactgtaggggtcactgttgctgcagctcacagtcccctggcccccggatgcctcgcaccccgcacaaagatgacttctctacccagaacacaaccctcttacgtggggcatgaaggatggagtccagccaaacgtgcttcaaaatctcagaattacaacttgaagtagagttttttttttttttttttttgagatggagtctctgtcacccaggctagagtgcagtggtgcaatctctgctcactgcaagctccacctcccagattcaagtatttgcctgccacagcatcccgagtagctgggattgcaagtgcctgccaacacacccagctaatttttgtatttttagtagagatggggtttcaccatgttggccaggatggtctcgatctcctgacttcaggtgatccacttgcctcggcctcctaaagtgctgggattacaggtgtgattaaacattacatttactgagcttgaaatgtgaggtagcttattcggtctacatttagactctgtccaacacagcatctacgttggaggctggacacgggctcctctcacggcagagctgctgctcctccgcgtctcacgcaggtggtctgctgtcctcagcggatggatggcgtggtcagagcccaggagcctccgggccagccctgactgctgctcctggctctgagctagtgttttaattctttaattattccatggctcttttcctattccacagaggagtacaaattaattatttggtaaggcacttaattaaaagtagagctctgaggctgccgggtaaaagctgaagccaggctgcagcccgggccctgggcctctcccttggccctgcagtccttttcccgggccctgcattcctctcccccagccccacactcctctccccctcgccctgtactcctctcccctgcactcctctccccccaccctgcactcctctccccccaccctgcactcctctccccccaccctgcactcctctcctctgcactcctctcccctgcactcctctcccccagccccacactcctctccccacctccctgcactcctctcccctgcactcctctcccccagccccacactcctctccccctgccctgcactactctcccctgcactactctcccccagccctgcactccactcccctgcactcctctcccgtgcactcatctcccctgcactccattcctccggccccacattcctctcctctgtgcaggggctggtctgggggctccacagggtccctatgacccactggtctctgcctgcccctccctgcactcctccccccaggctctgcccctccctggcctcctctttctgtagaaacccggctttctgtcatgcctccccccacgtttatctgcagggacattctggctgctgacgtggctttgcccacccagccaggctaatgtggctcccttctcctccctggtccttccctcttgagtgaggcccacctgtggcccttccagcccttgcagggccagtgtggatggcaggaatgactggctgtgtgggaggaacctgggctccaggcgccagccagggggatttatggaaagagcagccccctgtcctgaagtcaagggtctgtctccgtggccttcccaggacaggcaggaactgctggagggggtcctgccctgtggggcctgccccatccttggagctgaatgacccaggtgctgtgacctcagtgggagcccaggccaggcgggcccaggggcgcagttgctccacagacacagagcaaatggagccgccaggcagccccgcagggcacgtgggcactcaggaggcagctctgtgcagaactggcaggcatgacccaggccccatcagatgtgcccccaaccccgtcctcctggggagggcagacaccccacgtcaggggacctggggccgagccctccctgggcccccgtgccggcctcattgcactgtgggactgctcctcatgcctgttgagcagacagcaggacttagagcttggtgacagatgggcaagcaggcgacagctgctggtttccagagaagctcgtgcctccccacacccgccccgggcctaggatgtgtcagggaggttgggtctcctgagggcctggcgtgggggaagatggctcaggtcatacatggtcccctggggcaagggaaaatggtttgctaggagaagaaaagatccattctttatcactggatttgaaacaaaatgactttttttctttgcaagcacagattattttcaggagcaataaatgccttaaaaaaagaaaagctagagacgaagaaagctagagaagaaagctagaaggtcccctgaccctgttctcagttaagggcttctccacaccagccagagcaaacccacaccaccctccaacaggcatgggggaccggccctcggggtggtgggagcccccatgtgcacgcaggagctgcccgccttggaaggaagggctctaagccgtgtgagagaccaaagctcccctggcactgactggcaggaaagcaaagatctatctgaccagtaggttctcttagtaatatttgttactgtatgaatgtttggggtccaagtgcggtcttactacgtggatctgttgtgtagtggtgaagtctgggctttgagtgtagccatcactgaataacatagatgggcccgagcggcgaattctcaccctcctctcccttcccagcctcccgggtctgcagcgtccattgtcccatgtgctacatccatgcacgcatgtaatttggctcccacttaaatgtgtgaatgtgcagtatttractttctgattctgcattgtttcactcaagataatggctccagttccatccatgttgctgcaaaagacaggatttcatccttttttatggctgaatagtattccattgtgtgcaaaagacaggacttcatccttttttatggctgaatagtattccattgtgtgcaacagacaggacttcatccttttttatggctgaatagtattccattgtgcgcaacagacagaacttcatcctttttcatagctgagtagtattccattgtgtggacacaccacgttttctttatccattcatccactgatggacacttacgtcgatttcatgttttgctatcgttccagtgtgcatttccgaagggtagtctacttttgcttaaacttgagtttgccgtagaagtcagatttccatggatgacccctccttctgcacctccacatgcacasgtggatcctcccctctgacaggaggtgctacsccgcctgctcrtgtggacgctgaggcaaagcaggctgcccatgccctttgcggggctggcaagcccttggtccacacccagatgcacgttcaggggctgaaaggccccatcctactctaagactgcaggtttgctgccttccaggaatttacaattcatggcaacaaaccttggggtgtgtttaacaaatgctcattgaattgggcatttttatctcccagatgtggctggactggtgagatctctccctgagtgacaggcaggcctggagagagttggatgaaaataaaaccagatagaaaccgtagagtgtgacacagcgtttgtaagctggggacacagtgttgatttaggaacaaggagctgtaagctggggacgtggcattgatttaggaacaaggagctataagctggggatgcggcgttgattttaggaacaaggagttgtaagctggggatgcagcgttgatttaggaacaaggagttgtaagctgtggacacagcgttgattttagaacaaggagttgtaagctggggacgtggcgttgatttaggaacaaggagttgtaagctggggacgcagcgttgatttaggaacaaggagttgtaagctggggacgtggcattgattttaggaacaaggagctgtaagctggggacacggcgttgattttaggaacaaggagctgtaagctggggacgcggcgttgattttaggaacaaggagctgtaagctggggacgcggcgttgattttaggaacaaggagctgtaagctggggacgcggcgttgattttaggaacaaggagctgtaagctggggacacggcgttgattttaggaaccaggagttgtaagctggggacgcggcattgatttaggaacaaggagttgtaagctggggatgcggcgttgatttgattttagaacaaggagctgtaagctggggacgcggtgctgattttaggaacaaggagctgtgggccaaagtggaaggcgctcgctctaacgctgcctcagattcgtcccaatgactgtgggaaacacaggcatcttcctctcgctccctggtctctgtccttgtctaaattcccttccctaagatgtgttgtttgttttctgctggttattttctgtcagctttaagaggagaaatatgaggaaactttgctgtgctgcttcgtggattaaattaaaaaggaagcagtggcgggttaccattgccacccagtgttaagtggctcagagcgagtcacctgccctgacctgcatcggtattttctcctctagaagcagaccagtattaatggcctgtagtgaagtatcgctgtgtcaataatatttaaagaggaggaaaacaacgtgatacattaggtcttctctgtgggtttcaaagcaacacccaacacactggtcactgacacagggactttgcgataaattattcaagccacagctcagggtgtaaactgcagccgtgcattttgaaattaggcagtaaaataacagcattgtgtatgactccagacacgggcgcagggagacccagtgagctcagtgcatggggggccactgaccccccttgggttttgtcttccgaggccattggcattttagggagagatcgtccagctctgggcctgtctgctcaatcgacgctctccagagaggccttcaacccccgtagggtcaacactcatctcaaatcagagatttgaacttccgacctaggatgggttcttcctgctgtcctggacccgtgctgggttgggggtggctctccaggacctagctctgtggcccaccctgcccctctcttgcatgaaagtggagccagggcggggactcagggacaggacacctcccggctggccgacctctggctctccaggcctggcagatgattccgatcgccacctccccatgtttcctgagccctcatgggagtttctggaagcttcccactgctctttctcttctgtggttcctggccctgggtggacgcgtcatggaaattacatttctgaaaggggaggaaaaaaaagcacatggggtatgtcctggctctgaccgggtacgggatgtccctgtggggtctttttytgcggaggctcagggctgcttaggtggtttttttttttaatttcataaagtcatacaacctaggaaaaaatctattttcctcttttgtccttggtcttaatgtgaacacggacaggtacgcaccgatataggaaacctgctcttcagagaaatccgaatctatttacgttttgatagaaaatcttatgagccgcccataatatgttgtgggaaaatgagttagagctcgtgatcagaaaatggaaagttgcaactcacacctcaatagaggccacccacctgcgatgatcctcctgaagcgtggcctgtgggaggggactgtgacctgggcagaccccgtgggatccgtcataagggaacacctcccagtaagacgggggctccaggctcaggcgcccaaaccacagctccccactgggagtgacccggccgccacgcgtctgtctcctggcgtctgtgtgtccccttcaaggggcctgcgtgggcaaaactgaagatactgtctatgcttcctsagcagaaggagccaaaaggtcttcccatcgcatacttcttcttagatttaggcgtgggcagtgattccagctggactctggaggacagtccacaagctcggctgtcctgtggccacggtgcctgggggctcctggtggagtgtgaccccccacatctgcctctgctccctgctctctgttgggccaccccaacccctccaggggacccccagataaaggcttgtgtgcactggtgttttccagagcagaaaatcctctacagcttttgtgttttattttgttttgttttatttttatttagttctgtgtattctaatgtgttattaaaaccttagcaccataaggcgctgatttcaggagccctcctgttagaatgaggtggtgctgagagacccactcagtacagaccgtgtggccggtcccccaacctgccagctcttcccacaggcagaagctcagaggctgcaagggactccgtggccatggcgattccactcccaactcatcctggagagcgagagactcggggccatgagcagcccctctttccagagaacgtgtcgycatgcagtctttgatcacgtttaaatgaacaaaatttgggtgttttgttttcatggaactcacctttagggtggccttctcacagcaatgattctgcttttcatttacagtagtgatacacaattttccatgtattagatgatataattaaaaagtgaggctttaaaaacatactgagtgcctgacagctcgggtggcacatggggaccaccagtctccctgggcgaatgggctgtgggccgagtccyggcactcaggcgtctgttctcaaatactggctggagcctcctgcatgtctgggctgtgcctgtgctggcctgatggtgatggargccctgactgtcatgcaggcctgcgaggggcacgggctgtgaccgatgctgggagccttttttgagccccgggagggtctgatctcactcctgctcagcgcttaggtgcccttggcctcgtcctgggtccccagccttgggtgcatcacttctgggagggtctaatctcactcttgcttggtgcttaggtgcccttggccttgtcctgggtccccagccttgggtgtgtcacttgctgggatctgctgagaacagccccgtgcagctctcaccccaacactccctgtagcccatctccacagatcctcactgggtcccaggcaggctgcaagtctgtgctagctccagggtttaacaggaaacaggtccgccctccctcgccctccctcaccctccctcagccagagggaaaccggccctgagtttctgtgccctgcacgggcagcacccggtgccaccagggctctgtgagtttccttcagtgaagaggacgtgtagaggagctgggtggggccaggactccaccaggaagtgcaggccgggcccacggcattgggttcataacaagtggcaagacccatttgtcaaagagaatctgttcctggttaggaaaaggaaacctcagaaatgccggccattgccctttttaaagtgtctctgtggcaggaattgtccgggtactttcctggggatccccttagccaccctccgaggatgggattgcgactcccatcacagggagactgagaaacagcagagcccgtcatgccccagcctgttgccctgtgctgcatcaggctgggtgcctctcagggaagctcggtcgccttggcttgtgacaggctggagcatatccagcagccctggcagtggagatagcagtgcccctgcatccacaccccaaagcctggcagtggagatgagcagtgccctcatgtccacaccccgcacaccttcagagtcagatgtggactctggccagggccagggaagttcgctggactctggggatctggggcacatcttgctggcagggttgacaccagcagctctctctgcctgactggagactcggcccccctccccagtcctcctcggtaagcgctgggactgggctggtcactcctgcctgtccattcactcacccactgtgcgccaagtcctccctcccactgtatcggagggaagctcggtgacattccagtgtcctagtccacgtgctttgtgccccaggcagccccagctcctgagcaccggcccagcaacatgagaggctgtttcctgggacttcactgggaaggggaccagcrtgtcctactgtcagcaccgccctgagccctgacccccagcctgccctgctcccccatccaccgatgtctcctcccttgccttgtgtcgctctccccctgcccagaacttgccagaggtgggtgcagggcggggaccgttgggcatggkggcatggagtgtggcccaagccttggggagagggtgggtgggggtgccctgaaggaaggagaacctggatcccagaggacttggagcccctggaggccacccctgtgcgcaggtgccgtgatgcattcctggcccgtgcccaatctctgctgcacctgtccccgtccctcccctctgtgctccaggtcactcgcctgcttgggaagctgtgtcgctacacgaccctggatcctgcttatgatctgttgractccacgagtgcccggtcttccccggtggcgctcatgaattatttatctgggcccgctctgccctgggctcgcactcacattaactcgtgtccccagctgcagcttcacctgggcttgttttcgtctcggtgtatttggagcgcagaagagcaacttgcatttttcttcatagagggatggagggcaggttttgttgagaaatacaaatttgatttatttccaagaaaacaayttttactgtcaaagaagggacacgaagcagctctgcatttggcagcccccagaagagttttctttgcagctaatgaggaggagggggagaaggcaggtcagcgcagccctgggcagggcggggtgggatgcgggggcagagaccttggccgagtgtggaaggaacacagccagcaggcgggggattgggcagaaggcctgccctgacctcycaatgctgcttcccttgagytacctgagccccggtttcccatctgtgaagtggggtggacrtgacaaggatgtgtcattccggcccgtcaggtacccgaaggtgaggtggcacccgcccccgctgcctcccccagaccatggtgtccagcagaatcatggctaagcagccacgaaggcacccacccccctcatccctccaccccttagacgcacttggtcagagcggtgcagaaaggaaagggctacagcagccctggtccctccgacccagccacagatggtgccccccacaagactccgctttcttctgccctctgagtcttacccccttatgaaaaccgctgtctttctttcttttctttttctcttttcttttcttttttctaaggtgtggtcttgctctgtcacccaggctggagtgcagtagtgcaatctcggctcactgcagcttagacctcctgggctcaggcgatcctcccacctcagcctctcgagtagctgggactgcaggcatgcgccaccacgcctagcttaacttttatatttttagtagagacagagtttcaccatgttgcccaggctggtctcaaactcctgggcttaagtgatctgcctgcctcagcctcccaaagtgctgggattacaggcatgaaccactgtgcctggccaaaaaccacggtctttcgactcagcctgagctgtgccgggatcttcttgcccattcagcctccagcccgggggtatctgcacctttagaatgtcagttccttagcgcagaggaatgtgttatagcggtaggagttcaggatttaggtcttgcctttttcttcatttaactggcatgaaagagacatgtttgcatatgaggacacagagggtgtccctgattttcctcaggtcacactgcccattcctggctttagacacagatgtgagaaggggatgcaccccaagaatgggacacgggtgtggcgatgctgcccagagcagccctgcccagggtgcagcccagcactgacattctgcaccccactgggggccaggaaacaacccctttcttgtaggtggttttttagaaagtgtggacrtgcatgacctgtggaccgggtcatgggcatttctcgcctgtgcatccctcccccggttccctccagccccsctgtgctccctggggcttgcagactgagtcttccaaagggtttgcacccgtctgactcactgttgttacttatagtagcactaagaagggtccctgattcatcactgttctgatgtacacacctgcccgggaatgcgtttggtgtgtttggtctatcagcacgtgaaagacagggaaccctcctgtggggccatgtcaagacgtgcaggcaggacactgtcctctgctctggaggttcagttgctttagctgggcccggccactgcaaaccagcctcaggagagctgggggcacgcctgggagttgcaacatgtggcaatttagggggaaatgagagagagagacagagactgcactgataattctccgtgtgaccaaagcacaaagaagcctgtctttgggagacaagctggaaatggccaggacgccagtgggggctccggggagagacagcatggtgttccctggtgctcccatggtgccacaggacatgcatcactcacagtccacaaacaattcgggaaaggcagggaacgcagcttctcctctccgtctgcatgaggcagctttgaccctggcttggagaagacaaaagggggagtggtgaggactccggtcccctgcatgtccggacagtgttctctggatccctgctgcagtaacgcagggaatggcaggtgtggggagagctgggggcatcagtgatgtccggagacccttctctggatccctgctgcattaacgtggggaatggcaggtgtggggagagctgggggcatcagtgatggaggtgtcagaagtgatggggccaccccactgggatgctgcattgaaaagcagattccctattgccctgaatgtcccactttctgcagaatggatgttcttagtcccccatccgctctgtaactgtggatcccacactgcataataactgccccatctctagagaaagactgatagcatttaggacaggcccgaggaacctgtattccaactgttcacccagtgtgaacaaaaccagcaggccgcttcctccagctattcagcatccagacataaaactcagcagtgggaccaggcagctcctgctgtccaccgggtctgctctgcccctgggaagtctcttatgcaagagataatgactgacaggtcatcacaccctattagtgaccggacactacgcccccattaatgacctgtcatctcaccccgtttagtgaccgatcaccccattagtgaggggtcatattgcccccrttagtgaccggttgtctcacccccactagtgactggtcatcacgccccctttccctttagtgactggtaacctcgccccctttagtgaccggtcatcttgcccccgtttaggttccagtaagctccacacagcaccttaccttaagggaggaagagatttcagaagcagatctggacacttcgtgcttcctaatcccaggaagaaatggaatctctgtgttgccgaccaagygtgggcggcgtgctggggcagtgcagctgtttcatggctggctgtgaccttcacgggctcattccccactggctggtggagggggatcatcactccctagatgtgtaccggcagctactccagtgcatgaacccgttatatcctaaagcggggttctcctgggacacaggtgaaccccagcgtgtccagcagcctccctctcactgcggctatagctgataccgtgcaaatgaccccaaagtcactgggccccctcgctccagattcactctggagggtcctggaggaggggtggagtgggtcagaaaccggcagctcctgtcagtgggtgggcaccgaccacctgctccaaaatgtctcctctgcccagttacttccagtcctgccaactggatggtccttgggtttcattagttcttccaagggcagaaccccgtggaagagtgaagccttcattatttctaatttagcactattggcttgaatcaagcagtcctaatatcaaaccgtggtaatgctgagtgaatgggaattttgagtgaggacgaaaggaagcgtgatgtctgaatagtgcagatgtcgcagaaaggcaggcaggagggaaaggaccacagagaggagatgccacctgggagaggcaggcatggcctgtgcttggggagatggagacggatgcagccagttctgacctccagccccacctctgccactgaccacggtgaccacacacggggtgccctgcctctctgggcgtcagtttctgcgtgtctacaaggaagcaattggactagctgacctctcaggccattatctgccgccagagtccatggtcctaaagcgaagcctcatccgcttggcagtcttgcctgggtcctagtggtggagccttcacgttgcctcacatccaacagtgactcgtcagaggcagacatacttgctggcagctttgcagcaccctctccatagcttcccccggacatacgagagcggggctgtagatgagggtatctatctcatgctattgcctcactgagcaccagagaagatggtcagaacccctccctcctcccacctccatccatctggaagcaggaagtgtgtttgtgttctggcctttctcttgtcagtagtgagagattcgttacatttcaaccccaagcatttcacatgcggtggcatcttggaggagctttctaagcgaggccgggtctcgtcagccaggtgggctgtctggctggtctccctgctctcgagattcaaccccaagcatttcacacgcggtggcatcttggaggagctttctgagcgaggccgggtctcgtcagccaggtgggctatccggctggtctccctgctctccggatttggatgcatggtttccgtgcacctccctcaggagtttgttcaagagcagcgctggctgtgcagtgagtagaaaacacacttgctgtatctacacagagaagtttaaaagaacagaagaaggacagaggcttcaggaccacagtgatggatctgaggggggcctgaatcttaaaccctatccgtatagtctccaagcagggatcatatatggtataactrcattttcatctctaatcactggggcggcatgtcagtatcttctctttctttcccattttgagtgacatagtgtgatatgtctaatgacaactagaacaaattctggtaatgaggtcaccttgggccaggatgactgtctgacggctgttttccatagaaattacttgtgaaggcacaccacacacacagaatggcttcctccaagtgtaggtgtcaacaggcaaatatgctaaactcgcaagatggaagtggcttgcccggtctctctagtttagaccgataaattggtctacattgagagagctgctgcttttttctaaaaaaagagtgattggttgtgattatttagtttcctccaggtgcacgctttttatgtggaatgcactggatggcttaaatkcaagtagggcccaaacatctgatgtcactttgttaaagggagtgttgagtgagcacagtcgacgctcccagaattgtggagaggatggctgcagsagaaagctgtcagtcaaggcccatgaaccaagaggagtgctagagaccaccacctgcaggtgggatttggaaaaggggaaagaagtgtgggcgctcagccaggggagtagcaccgggtggggagcagcacggggtggggaagccaggaggcctctacacagagagcctgggcctgaggccgacagtgaggggcaggaggccagtggctgaggcagggcctagtgcagaagtcaggggcagacgtgagtattgggctcgccacgtcctgtgactagggagcttctgcaggtctttagaagcggttggtgggataagagcccatgtcggggatgagctgcatgtggggagagctggagtcagggagaaaagtgaacagcctcaccgcgtggtcagctcgtggctgctgagcacagcccggtgtcagagagcaggactgagagtcagcttcatggagggcgcggcrggaacagcgccagcccccagcacccagcaaccatcactcaccactcacagggcccctggcattcacaccctggcctaggtttgggaaccttccagccagaaccggtgccgctggcttgggtggagcctggcgtgggatggggtggagcctggcgtggggggggtggagcctggcgtggagcctggcgtgggatggggtggagcctggcgtgggggggtggagcctggcgtggggggtggagcctggcgtgggattgggtggagcctggcgtgggatggggtggagcctggcgtgggatggggtggagcctggcgtgggatggggtggagcctggcgtggggggtggagcctggcgtggggaggtggagcctggcgtggggcggtggtttcaggtgaagaggactcaggcagggacgctggtttacacaaggtcattgttacctggacaactccctgagaatgatgagaaaatatgagccagaataaagaaggctgctgggttcccggctgtctccatggctaatgaaatgccattttccttcttggtgcttggctgtgcaagtgcaccctgtcaggcagattctccatctcacgggccccctgcgagtcaggaagagatgctcgcggcgctgggtgagccggctcctcctcagggattccagggaggctgcagggcttactgtgccgcagtttcagcaacagccccagaacatccgtgtgtccaggcaccaggacactagcgctgttggctcacacagccagacccacagcttttgagctgatgaactgcattacgtccagacaatttccacttaacagttgtccgtaacgctcctccctgggccagcagccacatgagaacaactcagcacagggattccagggactgggtcggcagcacggtctcaagcccacactcacaagctcacgtgtgcacacacacacgctactcctccggggcatgcaggcagcgtccctgagaatccctgcctcagactcactcccagggctggtggacacatgtgggcgggggcgggggaggccacagccctgaaagtcatgggttcaggtttcagctgtgtcagaagcacctggaagctggggtgggatgtgatcagcaccctcttcgtctctgtgactcggggttttgggggggaccccgcactctgcattcccctcttcgtctctatgactcggggtttaggggggaacccagtactctgcattcccctcctcatctctgtgactcggggtttaggggggaccctgcactgcattctcctcctcgtctctgtgactcggggtttgggggggaccctgcactctgcattcccctcctcgtctctgtgactcggggtttgggggggaccctgcactctgcattcccctcctcgtctctgtgactcggggtttgggggggaccctgcactctgcattcccctcctcatctctgtgactcggggtttgggggggaccctgcactctgcattcccctcctcgtctctgtgactcggggtttgggggggaccctgcactctgcattcccctcctcgtctctgtgactcggggtttgggggggaccctgcactctgcattcccctcctcgtctctgtgactcggggtttgggggggaccctgcactctgcattcccctcctcgtctctgtgactcggggtttggggggaacctggtactctgcattccctcctcatctctgtgactcggggtttaggggggaacccggtactctgcattcccctcctcatctctgtgactcggggtttaggggggaccctgcactctgcattcccctcctcgtctctgtgactcggggtttgggggggaccctgcactctgcattcccctcctcgtctctgtgactcggggtttaggggggaacccggtactctgcattcccctccatctctgtgactcggggtttggggggactctgcactctgcatccccctcctcgtctctgtgactcggggtttaggggggaccctgcactctgcatccccctcctcgtctctgtgactcggggtttaggggggaccctgcactctgcattcccctactcgtctctatgactcagggtttggggggaccctgcactctgcattcccctcctcgtctctatgactcagggtttggggggaccctgcactctgcattcccctcctcatctctatgactcagggtttggggggaccctgcactctgcmttcccctcctcgtctctttgacttggggtttaggggggaccctgcactctgcattcccctcctcgtctctgtgactcagggtttggggggaccctgcactctgcattcccctccttggctctatgactcggggtttggggggaccccgcactctgcattcccctcctcatctctgtgactcggggtttaggggggaccctgcactctgcattcccctcctcatctctgtgactcggggtttatgggggacgctgcactctgcattcccctccttgtctctgtgactcggggtttagaggggaccctgcactctgcattcccctcctcatctctatgatttggggtttgggggggaaccccacactctgcattcccctccttgtctctatgactcaggggttctgggcggtaccctgcactctgcattcccctcctcatctttatgactcaggggtttggggggaccccacattctacaaattctaacaacctccaggtggcacctggcgtaagggctgcatttggagaactgctgctttgcaaagcccttgaagaatgggctgatatgatagggaactggtgttayattaactcaaagccttcacatcatagcttgtgcctttccgaagtattgctaattaattaacttggaaacgcccaagggtcattttagatcaaaccttattttatgaaatagatgtaggttatgagccaataaaattttgatacattgaagtcattaaatcatttggtacactgagttattttttaaaataaagtaaactgaattactacaaaaaaaaatggaatcactccctgttaaattaactgaatgaaagggaaaagctccttttaaaacaggaaagaaactattgtttttactattttatcaatgactggagtcaaatttgtgtgtgtgttggtgtgttgaatatattgattggtttagttgaagttgagtttcatctgtcctggaatagcaggagtttgagcagtttcacccgtcccggaatagcaggagtttgagcagtttcacctgtcctggaatagcaggagtttgagcagtttcacctgtcctggaatagcatcaccgactatggaaggcttctccatgtctcgtccacacacattattgtctaaatggttctggtgacaccactgtctgcagttcctctgaatttgtataaggaccaagaaatgtgtgggttcttgcaaactctgaggtcactcttagggtaaaaggctgtttatccactcaactttggtatatgaggagcctttctgcaagttactgatctaactgtgtgagtgcctgacaacacagccagagtgcgcagggcatcaccagtgcccgtgtgggaggcggggctccgtgggaactggctacttaccccccacctgtccccagagcccgtgtgggaggcggggyttggtgggaactggctacttatccctcccctgtccccagtgcccgtgtgggaggtggggcttggtgggaactggctgatcatgtcacttctttaagcctgggtttcctcaggcttaaagggaggagcgtctgcctactttccaaggctgtgggcagatgtgatgctaatacaatcacgtagtatcttttatttatttatttttttgagatggagtcttgctctgttgctcaggctggagtgcagtggcatgatctcggctcacttgcaacctccgcccagccaggttcaagtgattctcctgcctcagtctcccaagtagctgggactacaggcacgtgccaccatgcccagctaatttttatagttttagtagagacggggttttgccatgttggccaggctggtctcgaagtcctgacctcaagtgactccccacctyggcctcccaaagtgctgggatgacaggtgtgagccaccgtgcccggccaatcacagggtatctatggctgtatcttatggctgctcagtcctagaagtttcttttccaactccgacaaatagctggagtaatttagtttggctttgaaacacttgactgaatttctaagatatttggagaatgttcttccctgtaagttgacataaaaagagacagtggtttaagaactttcttactcagatgcagagatactgaattaccctctggtgtgcagcctgcctatgaagtttgcatctcagcctgcataaaatgaataccctgatcaacaagttcctgttttgcagagaaacctcagtgatgtaataatatggtcatgatttccatcagtactgaatttttaccaagtcatcaaaatgtgatggtcactgaaacttaatgaaatgaggattacatttcaaagactaaggagtcctcagtgattatctttatgaggcttttgggggatccttgtattgctgaggaaatagactctattagttatctgatgctatacaacacactaccccgaactcaccagcttcgttcctgttgtcacagatcccccagctgcccagtcgggggctctggctctgggactcacatgagggtatggttggcttgctggcctgggctgcgattgagcaggaagctgagggacctcttaygcctgtgcatcacgcactgtattctatgcaacggatgcgagtcataaagtccagcccatacctccaaggaccggcattcagcggcaccccctgcagagagcagaatacataagcaggcgttgtcagccaccgggagcaccagaggtagataaaggaaccggaggcagcgtcgctctggagccgggctgcatggctcttctgtgtagtgaccaagtcatctggaccagctgcctcagtttccctatctgcaaaatgtgggctcccatagtgtctgcattagaggactgtcatgtgttaaatgtgatgtgagaacttagaatcatgaccagtgcatagcggacactcagcaacgtgcagttgccagtgtcaccgtcatcaccaccattgctgctgcagccacagcgacgtgaagtgttttctcagatgtggaatgttcttaactttggtggtttttccagagaaaaccatggattaaaggataatattttctaaactgagagttagcatgtctttctattgggaatttcattccctgataacttaagcaatgtcctctcatctccttcaggtattttgaacatttaaaacatttttctttttttttctatccattcagcagacattcattagccatctgctgtggactgggccctgtagtaggttctggttgtacacagaaagagaaacaatccctcctgccagggccgcgggggcgatgggagatggcaggtaggcaaggccaagcaggtgcagtakgcctgggggagggcggcccttggtgtatgcagctctggatcctggccttgccagtgctctgcagagtcaactccagagagccacccccctctgggccttccgctgggcaggtgtcgtagacaagaacatccagccttgtgagtcgccaggaaggcccaggggatgtctttctcccatcatggcgctatgcttcctggggtctcgtctgtcagccccacgagcagtgaggttggccccaaaaccaggaccgacttcaccacgaatgcaacctcactgtgacagaaaatcaggggaaaaggcttcccttgaggaagggaacagaaagtgtgcagtcccagagggaagtgggggagctgaggactcttgttcagaaagaatcatcactggggacccctgagctggatcagctgctcacctctgagcaaagtctagttctggcttctgctttcatgagtgtttgtgactttgaagggtttgttaaagatgccagcattaagaccttttcattattttcacaaatgctgtagctttaggtgtgaatgaatggacttgccttgccagaaactgtcttgagctcaaaagctttcaaaagagtaaaagactcagagcattgctaaacaatttcccgaatggtccctggctttgcttaggaaggacgtgaagccatagtatcttgctgtgtcttgtctaggaggaagtgtttggctcttgaaaagaaaggccaaaagacatgcggtcagcataagacgtctttgcaaagccactcctgacggcggagatggcggcagcaccacacgggagctgtttgagaagcagatcaggcagagtttcaccgaygtctgagagctagtttcacagccctgtgccagaggagccgtgtcttccacaaaacacacctgagagctggtttcagactttccgggaaactgccctggcccaaggcatctgtaaacctcttttatcctaattagtggtaacaattcaggtccacctgacctgtcattggcctttttagaaaactccttggtatttagtctgtagatgtgcatkcgacgtacagggagttcaggatctgttgtgggcctagttaccaaaggtgcctgagcctgctgcctgcggcggtgagtcctgccggcccacagacacatcgggaagctgacctccttccctcctcctcagccacgactcttgtcccagctgccaccagtcttgtcagggtgatcccccttcctgctcccccagcagcagcaacagggagctcttaggtgtcactagatcttcaagtgtccctgctgcagcctctcgagatggtaccagatcctacctctcacttcctcccgcccccacctcccctgctcacaggtactggacagagcagcattctctctgctccctgaacatgctcaattcatcccacctggggccttgtacactactccatgaacacactcacgtcatcccacctggggccttctcacgtcatcccacctggggccttgtacactactccatgaacacactcacgtcatcccacctggggccttgcacgctctgggccctccacctgccaggcacaatcccacatttgcccaggtggctcttggcattcaggcatcagcttgagtatcccctcaggagacctttcctggctcccagatctctgataaacccctcccacccctgtcactccagagcacattaacccctcccacttgacgcagagctcagagccctgatcagaaatcaccttgttcattgaatttggatcagtgccaccacagatggtgagttccatgcaagcttcatggggcacagccaccctacctgtgggtcacaccagggagtccccggtgctggaacggcacctgtacgcaataggctctctacaggtgtgcttaatgaatatgcatttcgttaatcagttaactaattattagattcatggactattagctgtggttcctacccttgcatctgttttattttccatacctactcatagtttttcatggaaactactgtgtttatggcttttcataattacatatacctctgaaatttgacgaaatctataacgattcctggcatgacagctatctttgttaataaacttcgatttgattcaacttctcttccactatgcctggctttgacgatttgggagcttaagcagaagtgtttatatcctctgtgacttagtaaaatgctaccacacctctatacccccacagtttaatatcaayaagacaacatgggcttaggtacatttaaaaacaaaatattacttagttttgtgatgaattacagtttgaagagtgtaccttagttatctgctctaggattatttaccccaatctgcggcacaagtccacggctacgtgcaagcatggtcggcagacgctggaggcagggagagggatggaccagtttgcgatcttggaggccccagggtctggtaggkcagccgcacaggcacaygcgtgactatcccaggaggcagcacgggaggcctcatggtggaggctccagtaaggtgctgggcagagtgggcgagaacctgggaactctgtagaatgaaggggtaattggtggggggggcttgcatctggattttaacccatggaactgaggaagaagcctcataactgaacaataaagagaacagaggccacagaggagagtgccagccggtgcyaggagcaggagaatgcccaacacaggaacagccagaggagccgctgggtctcaactctgctggaactcggctgccaggctgagcaactcatcagcgcctcctgggaatcgccgagcacctcacatcagagaagaaagatcagagcttgattctgggaagattcgtttgctgataacgcgatgggaaccagccctaagctgccatggccctggctgaggcccctttcccggcgtttcaccaggacatctgagctggggtggcttttgcttccagctcaccttgtgctacaaggacttggatggtgagcactcaggtgagggagggccctgtgctgggctgctgcccagctctgctctgccatcctcgacagaagttccctctctccacatcgcatggggtacaacaccccacctcggccacactgctttgtccaaagcctatctctagtttgtggctgtccttggaccaggctcagagcagctggacctccaccctgggaactcctgcagacaggcattgtggttgggaccctctgcatccccagtgcccagggcacacagtaggtacctggtggttatttaaaggacatgcaatggaaaaaaaaaaaggtaaattcacatggaaaagacagtgaggttttagactcctttgaacatgrataccagacacggagggcaggcaggggctggtggggctgatttatgccaagcctggcaccaagggctggcctcatccttgaatctgacacccatgtgacatctatgacactcactgaaaagcacagttcgggtctagggagctcgcccaagtttgtgtagaatgaagcacgtctcctcgtggggccgtgggaatatgaatagctgacagctgaggaatgatttgcctgcattcagggactcctaggtgcctgacccrggagagcaagaggacacaatggtgacctgagccgacatcacagggacgaggagattggggtgtctggagatggagaggctctcagacatgaggagacaggggctggcatccrgtccttatccgaaagtacaggattgaaacttgaaggaaatctgggttagagaaacggatacagggtgcagatgctcggatccagtggttggaatcatggggtggacaagagagtggacagcagtgttggcaggaactggagggccccagcgtggacagcagtgttggcaggaactggggggccccagaaaggcctaggggaagccaagatcgaggtcccaggaggaggagaatgtgctgggcctgggctgyaccctgctgatggaggcagggtccgggccaggcctttagtgtgagttcttatccagaaacaccctctgctctccccagcccctcactagccctgcccagaggtcacaggcgtcaggaggcatttctgactagggcttgttccataccctggtcctctgctcactcccagacatgtgcgccatgatggtgaacatgcctgaggggctggggatggacgtgggcacctcttctcagtgcccgcccgcacagctcttcacccacagacactgcgcccacttctgccctgtgtctacacttgccagaccccccmccgccctggaaatttgcaaatccaccatgcccagcaacacctccccagcacctgacccgctacctgtgtcttcccatggagccctgcccaccccagcccctgccctctgtgtcttaccacagagccctgcccgcccctgcccaggctcccactgccatcacccgctgaggtctgaggtcccacccacccctgccggctgagaccagagatgtccacgacaaggcayggacgagcccccagtcacatcgtcccatggcaggaccgacggttcccactgccagtgaacactgttcttgaggcttcactctgtctctgtcttctckaagtggacccactaactccacagtagggcagccccatgctcccaaggtgccacagggaatcaagggcaggtggaagggccctgtttgaaattaaaggggatttccccgtgagctggggaggagccccgtggaagaccttgtgggcagggtggcccggctggagtggcaccattgacaccgtgctggagatgagaaaatgctagtgggaggcaaacagacttgactgcagggtcactctgcacatcaaccagggtgctgtccattctttccacaatgatcatcgccggatccgcagggccggcgctcatgacctgtgcagcgtcaacaccgccaacccrccgtccagcagtgcaagtcaggcagctcagcctgtgctccatgttayggccacacctgctaccccgccaacgtcaacagcagtggtcagagagatctaatataaatgtatcatttggcattcactctggaaggaagctcaccaatggcttgtaacaccactgacaatgaatggagaaatgtgtttccagtccccccaacagaaggaggacagcgcgagaggccacttttcataccctgtggttccagtccaccctaacggaagaaagacagcgctagagactgctttccatgccgcgtggtcttctaaaagcatgctatttattttatctttgttgctatgctttcatctttttaaattttacattgccattacaaaaaatagtacagattttaaaaatcttacaacagtgctttacatcttatatcttggccattacctgaaaattagggctttgattcaaggagagccatctaatccagtgaggccatcctctgctgtgcagaaggatattctttacagggtaagccccacccggctgtggctgtgtctcatgtagacagcttgtttggctctatgcacatctttctctaagacctctgattatttagcaaaattatttaaatggtgtatataaatattggaaattcatttccctcccatcaggaaaatgacataagaagtctgtggatgtctggaacttttaaatattgaagagcctaccccctgttatttccccccaccctttccccattcctccccacagcatgctatttgttattttacatctgcaggttttatgtggttctatttggcctttaaatcctgtgtctgtcctatcagcccatgaactaaaggcaggccaagtagggctgtcttccccaaaactgccagcaaagctgcttcatccctcgaaggcccctgcacaacctcctcccacccactgctgctccagggcatctcatggggcctctcctgcaggccagtgaggccgctgcagcccagagtgcaggcttatgtcacccctggcttcagtggggccctgctatcacagtgtggaattcctgaggtctctgaagcctgttcttgtggtgtggagttcctgcagtctctgaagtcctgttctcgtggtgtgaattcctacggtctctgaagcctgctctcgtggtgtggagttcctgtggtctctgaagccctgttctcatggtgtggagttactctggtctctgaagccctgttctcgtggtgtggagtttctgcggtctctgaagccctgttctcatggtgtggagttcccatggtctctgaagccctgctctcgtggtgtggagtgcccatggtctctgaagccctgctctcgtggtgtggagtgcccgtggtctctgaagcyctgctctcgtggtgtggagtgcccgtggtctctgaagccctgctctcgtggtgtggagtkcccgtggtctctgaagcyctgctctcgtggtgtggagtgcccgtggtctctgaagctctgctctcgtggtgtggagttcccgtggtctctgaagccctgctctcgtggtgtggagttcccgtggtctctgaagccctgctctcgtggtgtggagttcctgtggtctctcccacagggcctggacccccttctcttgggtgacataggcattctctcgtcctgagctgctgtcagtcagcaggttaatgcccatgtgctctggtttcatcctttaagacccgaggtcccatttgcctcattccaggtgcctctgcatgtgtctgtcatccttagaatgatgtgcatttgaaccagtggagaaaaaacacagaatgactgacgtgagttttgacacgattttcgttaggaccttggcatgctgggtgccagagaacctgttctagtgaaygccttttacacttccaagctgtgcaatcttgtgatatgctccattttcttctgccttgatagccaaatgccaatcaytggggagaaaaattctgctgctgaatgaggcagcrcacgatttgccctctggaaattgaacatttaccttaagtggtaaaaggtgttttccataccttgatataagtttgcataggactstctgctttcatagttctcacttgkgtatgcagaactgacatctttgtgaattattctcttttctttcactggagtgtttaatatgcattttaaaattgcttctgtacatatgcagtggataaattaaggtacagaagaaggtttctcagtctacaccatccctrgggagttctttttgcttcacttcaagtagtagctattgtcgcctctggcagtgaagtctctgttactttaccaatgctctcattactgcattctaaaacggtgggttttttttctttctttctttcccacttttttttttattggcttgggatttgtgtcttaatcaaagtgtgcaagaaatgcacttaatcgtaaaacagggtggcagttttacaagatgcttcagttaattagcacggaattgctggggaacgttccargggggttcctggtctccattacatcaaatgagtttgctgtgattaatgttatcataggaaataccaaagaaattaataacgattaagccattacttccaagtggcgctcattacagcaagagctttaagaaaccccaccaacttcaatttctctgtcctgaggtgtgtctatgctgcactggggtggaatatccccagactcacctggatattctgaattttctgattcatttttcttccagaaatcttcaaatacggattcgtgatggataagaaaaaaataaccttttttattgaaggtctgatgcttcaaaaatgcatttattcattccaaaaaatattcagtacaagtacaaatatttagtatgtacaaagctctgagttggatactcaggggtaagaacaaagatgaacagaatccagctcttttcttgaagaactcatggagaaaacacccacataagcaagatgaattacaagggtgtgttattaaatctgtgatagaggcacaggcagaggaagaggtggtgaactttctctaggattatttcagctgactttackgggtaaatgggatttcagctgcttccaaaaatggtgcagatttgccaggcagatggaagtcatgtgatggagtggtgcctcgtgcgtgcagggacaagccagctttggtcactgggcagagagggggaccagggagtgtcaggggcactgtgagctctgaagaatgagcttagaattagggtaggaaacacgagaatgagccccagagagggcatgctgggcacagaagccactccactggctgcacagctacccctgcygggctgtccwtgtgtgttgtgctgggcacaggtcccaccaaggctcaccaggatctaggtcttgccctggggtgggcaacctgtgggggggggggtccgctctgagcgtgacaatgaagcacactgctgccagttacagtgagaggaggaaacatgcccctgccatctgcgcagctgcatctggccacccacccgcaccaatggtgaggacgccatcagcgtggctctggcacagcttcactccctgctctgctctattttcatgacttcagacccttgtgctggaatagagactttccccttctttcttcccctgggattgtcacctccctgctagttgggatgctgtctctgtcccccggttctgctgagcagagcacctgggacagtgtgtgggtctaatgagcattgcttccacgatgctttctatttgcctgcagatgaccttgggtacttgtgtgctggtgtttctcartgtgtgtcctgagctcttggggagttcatagggcaaaggtggcaagtatattgtgcagttatccctaaattattatttccaacagtgtggccccagtgtctaatacaaaactgagctggtagagccctggccctgtggkaaacaaatgtctttwacctttccctgtgtgttcctggaactgagcctctgcaactyccttgccagggccaccaatttccccaggccagcccagtgatgtttttcctggactcatcctctcacctgcattttcttggtggctgtgttaagtccctgcaccttcagggatcccgttggcctcaggagtctggcagtgtttgtttttgctactcacttatttcttggggaatttcccccaagaccctccgttcatttcttcctctcctctctcccttaggagatcaggagagtcaacatccaggtctgtgactccagcctttctcctgtgcaagctccaggcctgttcaggagcttttctgcttgggcctttctccaccatgcacagcccaatctgtctaagccaaactcccaggtgcycaaggtttctgctcccaccaggactcaactccagcttcaggctcagccacccccattcagaccctgtccacagcttccttccaagcatctcgcctcctccacaactcccaactccatggctacccctggcccccacctcaggaggttctgatgaaacccaggmagcacccagcctgccaccacctcccagctccccactcatgcccttctcatgatgatttcacttgagaaatcagaggtgggcaagtggccactgacaagtgcaggatgtgtgcaaagaggaaatactggcagccaggcacagtggctcatgcctgtaatcccagcacattgggaggctgaggtgggtggatcacttgagcttaggagtttgagaccagcctgggcaacatggtgagatcccgtctctacaaagaatacagaaataagctgggcatggtggtatgcacctgtggtcccagctacctgggaggttgaggcaggcagatcgctttagcctgggaagtggtggctgcagtgagctatggttgtaccattgcactccagcctgrgtgacagagcaagatgaaaaaaaaaaggaaacattgatgccatggatattgcaagatgttaacccttcatgtgcagcatctgacatgtgcagtacagactctcataatttatcctggattaaaaatttcaaygagtatacatttcaaaaggaaattcctttgtggctacctggacaaggaggtctcttgctgtttcttcggcaccttccactgagccgacagaggtcacttccatcgcccatgggaaatgtgcctactgctcgttttaactcatgcatggatataaaattagttcccatatatcccatctaccaggatcaacgggatttttttctctcactcttttttttcagcatcttcttcactctacacacagcaataaaataagtaaaatgatagcaggaatttacttggaaaaaacaaaacacaaacccttctaggctgtatgatgggtcaggagacacccaggctggattcttcatctgcaaggatgaccctggagatgtgccaaatagagaagtcagtgtttcaggtctgaggagcccagccccagccggcacctgctgagtggtcgcagacaygcggctccagcgttcragccttgttagatcccctggaaaaacagaaggaggctggttcacatccattcacacaaccccgagacccagaaactcttgaaaaccraaagttttcacaactcactttgcagcaaatcatgccctgaacagattgatggaaggctctgtgccctcctcacttactgcagaygatgccagtcagcacaggcatcacaggtgctgcccaaggccacagaggctgaaatgcagtgagtggaatggacaccattctgaaagctctgcattcctaggaaaggtaacctcaaggtttggagagaaggcctggtcctgtatccccacttctcacagttaccgcttgttacatggtgtcagatgttcaaggctgccttgtaaaccataaaacaccatgtgaatttttttaatattgagtcaggtgccacccccacaaatgatcctggagtagtgggtcctcccctgccctccgctgtagtaatttactagtgctaggtggtactgggtaaacatccagctcccagaaagccaagtctataaagggaagatactgaagaatgaagccagtgtccaaaggtatgttactaacaaatgatccaactaatattgtatttacactggtcacactggtgttcatcacaaaaagagaaccgtgcatgagatgagctcattggacctccatggacttgtgtcccatagctttgtggctgcccagaccccttctccctggattcagcctttatttttcctgatcattcatcccaaggtaaatacatcttcactcacagagggtcagccagatacttttcaatgtccaccctcctgtttgttgagtttttctctttttaggtatgactgactctcagtaaactgcacatacataacttgtgcgagttgatgacttgtggaatgggtcagcatcgttctccttttccccatgtcatggagtatttgtctgcctctgagtgaggacggggacacacagccctctcagcccacagtcagatttcacccactcctccattgctttacggtccaacaaacagaagaaactcatggcatttacaactcccagccacgtaaatgagatagaacctgccacacagagtctctacctgcaccttccatcccatttaccgtcatccgcattcagaaaggagtgcagctcagccgacaccttgacttcagcccagtgagacccgggctggacttctaacctgcagaacaataagtttgtctgtttgttctgaagagatagggtctcactctgtcgcccaggctggagtgcagtggcacaatcacagtgcactgcagcctcgacctcctaggctyaaggggtcctcccaagtagctgggactgtaagtgtgagccaccacatctggctaatttttaaaaaaaatttaatagagataggatctcaatatgttgcccaggtggttctcaaactcctggtctcaagcaatcctcctgtctcagcctcacaaagtgttgggattatgggcatgagccactgcacccagccagcctgtgggttttttaagccactaagtttgtggtgatttgttacaacagcagccaaagaaaacaaatatactttcaaacacagaactttttagaatgcaatcctttttaaaaatgttgatgagagtggtgatgaagatgatggtgatgatgatggtgatgacagtgatggtgctgatgatagtgaccattgtgatgatggtgataatggtgatggtgataatgaagatgatggtggtgatgaagatgatggtgatgatagtgatcattgtgatggtgataatggtaatggtgataatgaagacgatggtggtgatgaagatgatggtggtgatgaagatgatggggattgtgatgataaagatgatgatggtgatgaagatgttgatggtgataatgaagataatggtgatcataaagatgatgatggtgatggtgatagtagtgatggtaatgatgaagatgatggtgatgatgatagtgataattgtgatggtgataatgaagatgatggtggtgatgaagatgatggtgatgatggtgataatggggattgtgatgataaagatgatgatggtgatgaagatgttgatggtgataataaagataaaggtgatgataaagatggcgatgatggtgatagtgatgaagatgatggtaatgatggtgatgaagatgttgataatgaaaatgatggtggtggtgaagatgatggtggtaatgaagatgatggtggtgatggtgatgacakgaaggagaaagaggagtctcaggaaacaaaacaggaagccttttctttcacaggaaggcagttaaaccaggacagcagtgttgcttcataaataataaaacaccagcctagaacatgttttcaaagcaatttccaaagagtttataggccaccgagataacttttcttagtgagaagaagttcgatgtggctgagtactcctgttggaattagactttacagggataaaactgcagttctcctggcacctgcctgtgaatcaagctttctgtgtctctgtgtctgtgaaactgggattccagtgccccatgcatgctttgggaagctgattccacggtgctggtcaaagtgctgggcacagaggcgttcagtggctctcgagggcttcctggatttcccacacttatttggaggcattttgggaagtgcacttttgggttaagtttttggtaatgagggggctcttatttttgaagcagcacaattcttcagaaagtcrtaaaataagactctgaaatgctatctgagcatctaaatgttgagttgggtgtggggcagagagtgagcagtgatttaggagaggggaaagagaagaaagaagatgataagaaaagaacaccttgatctgagagctggaacctgctggggctctgaccctcctgaggtcccagttctcatggcactgggccaggcctgaggggtgactggggagagccaccctgtggtgatgtttgagtgggacccaaatgggtgtgtagggttggaaacctagaaatttttattagtgctgactttgatttgaaccttgcttcaccccctcagctgtgtaagctgggaatgccaaatggtgttgggaaggctcagtctctcgatggtgagatgcttgcggtgctgtcgtctgtccagtccawgccaggaaccctggtgaggggcaccgtctctttatgtgctatcaggaaagggctatgctccagctaaactctcttgccagtgttcataagaggcatcttgacttcagaggggttacactgtgaaaaagggttcgtcttgaaattgatgaaatatggtaatcttcatacatatggagtcaaaaactaagtatttagcacaaagtgggtactcaaagagtgctagctccctttccaactctctcccacaaatctacctccatatcctgttttcargtccctgtctggagatccctttcttggtgttctggaatttcctattgaatgaaagcatgtcacctactgatgaaggggccggtgtccctgtttgcctgggacagccctgccttgtgcctcagatccctgtgttccgctacggcactgacactcactcccaaaggtctctgttgaacataaattataccatggcccaactgacagagtgcagggcactcacaaaccaaagccctggcgagtctgtgcggtggagaaattggggcaagaggaggatcgtcgaaagaacaggccatggggatcagccagggttgagtggggtggggtttcacaccaaccttcaagtgggaagcttgaggaagggaatcagagcacccagtgccaagctctgaggtgagtcggtcaagtccatgatgctgcctcaggttggccctggtggtcacagctccacacgccaagtaaggccatcacagggtgttaatggcgtgagacagactcaagggccctgctgcacctgctcctgtgttgtggcctgcacggggttgtggatgaactgttttgaccaaattagattggcaaacatttaacctcaaatggatgaattcccctcattcccaaatcaccctcaagtttaactgtcttgactcattcaggtgatttttttttttttggtagcacaaaactggaatgttagggtcaaatgtcatcctaatatgctaataaccatccagcccagcagttgccaacatcttgctgatgaattagcctggggggtggggtccagcttccacatctctacatcgcccccagtgatcctctgtrcgtgtggggcggaccccagtctggcctagtgtttctgtagacgtgggtgtgtggagcatctgggagctccagcccaggtcggtgggaccaggaccagaactcaacactaccccacccagctgtccccatggtgtgccagtgggaacgggggtcccacacwgagggaggtcactgcgaggtggtcgtgccctcaacagcctcttacagatgaagactaagatctattgggaataatctttattaaaaaaaatactgcttgaacttgaacagggcaaataacatgtaattaggacttaatgactgggtgcagtggctcatacctataaatcccagcactttgggaggccaaggccaggagtttgagaccagcctgagcaacatagggagaactcgtctgtccaaaaataaaacaaaacaaaaggatttaatgatagaaattaagtttgagaaatgtagcaaccccggccattggactggaaagatgaacgagttagccctgttctggcatctcccrggtggactagcaccgaggtgctgtgacaggaagccaaggggacctcactgagaagcggcatcrtctgccctggggatggggtgagggcatgaccacagatctcccccctgcagacttctctcccaggcccgaactgtrgcctgtttccactcaaggctgcctggccattatggaaattctttatgtgtggaacacattctcagagaacgtgtgaagtaattacatccaagctgatgggctggttagcaactgaactgatgtgtgtaacacgtatctatgtgattacttttaagaactgggtcttaacctcagacatggtgcttaacaagaaataataaaaccaaaccaattcttagttattttagtcctgggactcagggctgctttcaataaattgtagattgctccaaaaccttgtttctgccattagttccagtattgtccaccttattttttccaggcaacaaagttgtcagttttctgcttctggtcttaaacacccccagcccgctattctacagcgtgcacacaggaaggaaaggatgccgcagaagggagggactgtctctgactgcaggtccacctgaggccrggagactgcccggctcagcctgcaggcttgcatctgacttgcaccgtggctgtcaragctgagagtgtgcrtctgctgagcacgtctgtgctgggcgctgcgctggctgagtgtctgccgtgtggacttgcttctctgcatgctgccttgcgaggtggcctcatcaccccatttaaagacaggaaaaccccgttcatagataggacagtatcaatgacctgccagcatcccatggctaagggcatgttcctcaccatttcagggctcaaagactaccttgctcaaggttatccaaatagtggggaatggaaccaagaatgccacagtctgtgggttgatatgaccctctagtccatgccatatatggtcctcatttgtaaattccttctggggtgaggctgagattattcctgactggttcactttgaacctccccatgtctgtaataggaacaggtgtcacgaacccttcctatgcttgtcactgaaaacccttcccaccggactcttccagcttgtccacaggtgttcctcaagtacctgccatgtgcaggctgcacctgaccccgggtgtgtaggtaccaataaaaggcctggggtctgacttcaggaagctgtagtcttaacattgatgaaaataatctgtrtattaaatagtgtaaaaactaagcacccttggtctgcwgtcctggatcagggtgtcctctaataatgagagacctgctggtgaccgagtttgacaattctattcctctgtgtatctgaacatatgcattaaagtcaacaccaaggaacaggaaacgggaaggggaataacgctcccgctgggggaataacgctcccgctggtggaataacactcctgctgaagtgtggccattcacattcggatctcatcctgctggcagcrgcgtgttttcatcgaccaggaaacacacaaatatttgtartcgtttatgctaatacgcaaacattttaaaagcactttgcttctccttaaatttcaaagaaaaatagaagactctggatttttcaaattagaaaatgacccactttcttcttcactgaaactgtttcataaaatactttcacatcctgtgtttcccgccagagtagggactgcgccgcttgtgtgcacccgccgggcactgaggcctcttcagcaggagggaaagtgagagggtgggacacagagtggctcttccagagcctcccacacaccccgggtccaggtgtggccgccgggtctccacacaccccgggtcccggtgcggccgccgccgggtctcctgggctcactgtgactcaggaagcctctttcccactggaactcatcctccataaacctgacagaggctcatgttcgggctcccataagtagacacatgtgtttagtgccttagaatatgagtgccgaatttactaagtgccttcgagtgtgagtgctgaaaggcagtcacctgaaaatttcattttacaaatcaggaaactgaagaatagagaaactaaataacaaagccaagattacaccgttattaaatggatgctttaatgctgagacaggtctcttgggcactagaccactttcctgccctctttttaaaattgttgttgttttaatcgactttttataatttttttttttttgagacagagtctgtctctgtcatccaggctggagtgcagtggcacaatctcaactcactgcaacctccacctcccgggttcaagcaattctcctgcctcagccttccatgtagctgggattacaggtgtgtaccaccatgcccagctaatttttttgattttcagtagagatgggtcttcaccctgttggccaggctggtctcgaactcctggcctcaagtgatccacctgccacagcctcccgacgtgctgggattacaggcatgagctaccacgcctgaccttataataattcttaatatctatattgtgtgccattgtgaaatttttggaaaaaatcaaaagaggaaagaaaaatatttcttcataatctctctaataaactataactactgtgaatattttggcatatttccttcaagagtgttacagatacatattttaatataattgagaatttcacttccatggttttggtttttgcttgttttttgttttgttttggttttgttttgtttttgtttttgagacggagtctcgctctgtcacccaggctggagtgcagtggcatgttcttggctcactgcaacctccctgtcctgtgttcaagtgattctcctgcctcagcctccagagtagctgggattacaggcgcccatcaccatgcctggctgatttttgtatttttagtagagacggggttttgctgtgttggccaggctggtctcgaacttctgacctcaggtgatccacccgcctcagcctcccagagtgctgggattacaggcgtaagccaccatgcctgaccatgtttttttgtttttgtttttgtttttcatttatcattgtatcataaaaatatcttggtcttttcaacatttgtaatatcattttaacggatgaataatttttcatccatgaaaatatatttacttagctatttccctattcttagagcttttatttctatatctaatgtttactgcacattttttaaatggaaagaattaaagatgtatttttaaaattgaaattagatggttaaaatgtatctatattttatctgttcttgacatgtgccacccaactcctttttcagaaaggttttattgatttacagtttaaaacagcacctgattatgattcttcccatgcttcttttgcaatgatgtttttgttatggtaaaatatacataaagtaaaatttaccattttaactattttcacctgtacaattcagtggcattaagtacattcacagtgtcatgcaaccatctccaccatccatctccaaaacttgttcattttctcaaactgaaactctgtattcactaaacaagaactcctcaacccctcccccggcccctggtacccaccgttccactttctgtctttatggatctgatgaccctagggacctcagagaagtgggatcataatatttgtcctcttatatatacaactcatttcccttaacataatatcctcaaggtttacccgtgttgtagcttggatgaatgtccttcacttttagggctgaataataccccgccgtgtatagaccacatgttttttatctgttcttcccctgatgggcactcagcttgcttccaccttctggctgttgggaatagtgctgctatacatgtcagtgtagaaatatccattcaagttcctgcttttgcattacttgagtgtttacctcacgtggaattgtggggtcaaatggtaattctatgtttaattttttgaggaattctcaagctatttcccagtgtggctgaaccattttacattcccactaggagtacacacgagtttcagtctctttacaccctcatgagcccttgttttctggttttctgaggatggccgtcctgaggagtgtgaagtggcatctcatggctcctgtttgcttttgcctaatggctggtgatgttgaacagctcaccatgggctcactctccatctgcacgtcgtctttggagaaatgtctattccaatccttgcttctttgttgttgggtgtaggagtcttacatatgttctagatactcctaatcagatatgtaattttcaaaygttttctctcattctttgggttactttttaactgtttagataatgttttttaatacacagaaggttttaattttgataaagtgcaataaagtgcaatttgtttatttttctttgttgcctgtgcctttagtgtcatactgagaaatcagtgccaaatccagtgtcatgaagcttccccctaagtcttcctagagctttatagtttcatcttgtaaattcagatatttgatcagttttaagttttgtatatgatgtaagttacaggtccagctttattcttttgcaagttgtctgagaaccatttgttgaaaagcctattcttttcctcattgaatggtcttggcacaattgtcaaaaagcatttgtacacaaaagggtttacttctgggctccgttttatagtccattggtctatatgtctgcctttctgccaggaccatgctgttttgattactatagctttgttgtaagtttaaatcagcaagtcttccagttttctttaagactgctttggttgtttgggttcccatgagattccatataaatttttggatgggttgttctatctctgaaaaaatatcaatatttttggtagagattatgttgaatctgtagatcactttgggtagtattaaaagctaacaataatgagccttataatacgtgaagatgggatgtctttccacttatttgtgtcttctttcatttaacaacactttgtagttttcagtgtacatgtccttcacctccttagttaagcctaccctaaatattttattctttcgatgctattgtacatggaattgctttttaaatgtccttttggcattgtttattttagtgtatagaagtacaaatgatttctgtatattgattttataccctgcaactttactaaatttgttaatamattctattaagttctaacagatctcttgtgtaaaatctttatgattttctacctataggatcatatcataagtgaacagaaacaattttatgtcttcttttctcatttagrtgmcttttacttatttttcttgcctaattcctgtggctggcacctccaatactgtcttgaataacagtggtgaaagcaggcctcctcatattgttcctagtcttaaaggaaaagycttccatcttttaccctggagtgttacattagctgcagatttttcatatatggcctttattatgttgaggtgattttctgttactcctagttygttgagcgtttttatcatgaaagagggttgaattttgtcagatgctttttctggatcagttgagatgatgatatgggtcctttccttcattctgttagtggggtgtattgcgtttattattttttatgtgttgaaccattcttgcattctaggaatacatcccacttggtcatggtacagcaatygttttaatatgcttctgaacttccgaattttgtctactagtattttgtcgaagattttttgcatcagtatttataagggatattggttcttagttttgtttgcttgtagtgtctgtctggctttcgtgtcagagtaatgctggactcacaggattagttagaaattgtttcctcttcaatattttggaaaagtttgaggaggagtggtgctaatccttctttaaatgtttggtaaaatttatccatcaaaccagcgactgcaggattttctttgggaggtttttgactacggtttcagtctccttactcactcctggtggggtcggttttctagttcttcatgactcagtctcagtaggttgcgtatttctaggaattttcccatttcttgtgttatcctgtttgtaggtgtgcaaatgctcatcacactcacttataatccttttcactttgtaccatcaaataataattattaatagtaatatataaataaaaagaatacaataatactatttaaaagtattaatcgatgatttattttgaatcttgtatctgtcgtgtgtaccatcagtgttttccttagggattatttggccataatactctgatcgcattttgattccatggatatgcttctctttaaacatctcatcctcttactgtacccctccttaatttatggaattcacccccccagggattaatacttaagtcctagatgccaaaaatatgtgtctcctaagctcacagttaggatgcrctgttgctgtggagaggggatgggggttggtacagggtgctgcagattctgggaagtgcacatcagatgaatttgtggggacttatagtcaccttgggtgactcttgtcccctgctctagagtaacartgggctctcaggtgcaagtgctygagctgtttattaacccttctgaacctctctgagccatggaggtcaaaygtatttccatttcccaagtggccattcgctcatgtggttctgatgttgggtaggacctttccttcccttttccttcttactctctaggtgtccaccattcaaaayagaatgggctcagatgcaggttttcatagtggcatgagccaggcattctagcaaggttgcagatttaaatgaaccctttacttggtggcaattgaaacaacttctttttgtaaattccaaacatgaattagtcacacaaatgaattccaactcacaggctaagaaaccaaaagcagtcaggccttctgtgtaacagtttatcctctgggaaagtgaggttcccaccatgacccctgaaacttgattcctctgtgggcccttgattctggtggccatgcatggattggacattccctagggaggagggcagccctgtcttggcatcactctgtcagtccttcccctggggagcactggcagctctgaaccagctgcttttgttcrctgtgtgcaggctgatgcccacgcaagaaatagcaactggtagacccaaagagggctagggatagccagtcaattgttgagtgcacattgagtcgaacagattcatttgtgtctgaggatttttcagcatttcttcagccagggacccagcctcttctggtagagtcacagactgggactggctcgcagccttgtttagtctaacttaggtaaaaccctctcggtagacacctgtgtccacacaccaaatgaacccagatgtggaccggagcgatcayggctacagcagcagcccagcctccccctccagatgtgctccacgtctcttgctgtctccaacacgtcagggagccaaccctgtgtcttctgctccctcacagccctgggcatgcagataacacactgtgaatgttcttaccttaaaccagccgtccctaggcttttctcatcaaacagccataaacaacagtgtactaaatgccagcacgtaggaagaataaartctcatccaaacacaagagaaacacatcctagtttcagcagcacacgaatggcctggggcagtgtcccagcagctgacatcctgatgagaaaacgcacctgtcagaatgtgcgggtttctcccttggtctcctgggttccttccaacctctgactctctttagaaatatgcaaaggctacgtattattggaaatcrcaccaatttgggggttttctcagatgcactatttgagactctcctgacctccacgtatkaagacccagagctgggtgcaaactgttccacacccctgggctaatgaagggatgggaatgcagagcccaggcaaaccccgcagggtgtccgccctagcaccctgyggggctgagctgcggtgccgccttgccctcyttgtctttctcttctgagctgtgccctgccacttaaaaccacaatggttgggagttgtctgaagaagagagttgatcctggagagcatttcttcaaatgcttggataaccctcctgctgtgtgctgtctggaagcagacgcaggtgcagaattgaggagttgcttctctcaggggatctgtgatgggcctgcggtgctttcccaggttttgccttcagagargttgaaatggcttaaaaattactggtaagccctcccctggctgctgatgagacctagaaatatctcccacccagggggatgtgagcccggctcagcattctagataggtctcccagctgcaaggaattccatgcatcacaaacatgatggtaccctcccctgtgttccttggaattrcttttctccaccaaattacctgtgatccagcacaaatatagagtmtgtttggcaaaaagaggtagcttaatcagcagtgaagagatgtgcctggatagaaaattcgcagctacaccaagctgctttttagtgtgaggcacaaatccagcattcgtgtgtgctgctcctggtacctgggatggccggtggatccgtctttctggactgcatctccagggggctccttggggacggtgagaggcacactggcccagcaccctccaccccacccgcttcactcccacactacccagaaacaaactaggaagtggcattttgtaaaaacaaaaagattgccagcaatttctaaatttttaaattttaagtctagtatttcggtttattattcttttaatttatcttaaaaaataattttgcaggagtaaatagaaatgatgaccaaaaaacatatgagatacttaaacacctcacctgatttggttctaaagataccagaaagaacttctgtgctttccctcccaggacactcaactgcatgggagaggccaccccgacttccacccctgaaaagggggtttctggggctcggcagggaggcggggcctcgctctggggtctggagctgtactgcaggccttaatatcaccccggctgagaccacttctctcacacaggcaccacaacccacaccacacacacacaccacacacagtacacaggcaccacccacatagacacacatgcagagactacacacaccacacagcacacgtgcaccacacacacaccacacagcacacacacagtacacaggcaccacccacatagacacacatgcagagactacacacaccacacagcacacacagtacacaggcaccacccacatggacacacatacagagactacacacaccacacagcacacgtgcaccacacacaccacagatctaggaatgcttctggaactttcactttttagtcaggaaactggaagtggctctgcctgttgcagcctcagatatgaatctgaacacctgaagctcttggaatggcctttccagagagttctgtggaagagactctaacacacatgcatcttcaagcgtttgtgcattccatggtgagggaaaggagagaatatttaaaccagcgatttctgcttcgaaatgcggatttgcttacatttctccagcaccgctcttatgccctcattcctttctcggtcgccctcaccctcaggagggatcctttggccatgtattccactcttaaccccagcttccaccagctgccccgggtctgagtcctcagacttggccctcctgtcccccaactgctctgatgatgcagctctgaaaaaatgagatgtytgtgaggggtgaggtgtctcctgtccagagagtgtccaagcagggcagtgtcaggatgtcatagaagtctttagggacaccggacctccagccatgtggatccaggttgcagggcagcacagacagcagccggcagcaaaggcacccgtgccagcagcctcatggtgtgaagaaggtgggcaggtggtgacgggcactccgctgtatcctgggaggacactctccatgccacccaggccgttccctctgtgcccggggagtgccgccagcccctgctcctgagttcccactgtgctcggggagtgctgccagcccctgctcccacgtctccatccatctgcctcgtgcactccagagacacaggccctaggaaggaggcttctcacacccggctctcctgtccttcccgaaagctcatcacatattgaacacggagccctccccagagctgctggggactctgtgcaagctgcacacgggtacagtcaacatggtgcatgcacaggacccccagatgtcgctgaggacttctcgagccagagggctcaccccgtgggtcyggtggttcctggcactggacggctcaccctgtggtcaggtggttcctggcactggacagctcaccctgtggtcaggtggctcctggaactggatagctcaccctgtgggccaatggaggccgtccccttcactgtgtgcatggctttctcccacctgccgtgctgacgtctcggtgatggacatcttcacgtcctggagagggaagtctctgtgatatgaagtctgctgtacccagggacactgtgaatgtttccacctgaaagcaagcaagtgtgttcagagcattcggtggtctgggtttgagcatcacctttatttcccctggggttcctgtcccctggcaggcaggcctgtgcacacctacccccaagtctgagggaaccaagaggcctgagaaagaggctgacagacccagtttctcagaaggaaacatttactagagatacaggaacagaagccacacctgtgtctccatggcgtgagatgagatgatggctccctcacccctagacccacrgctctgcaccacaggggaggggctgctcagggagccagcctatcacctacccacgttccaccacggagtcagcgtctccctccccaccctcgcctgtctccctgtgtcccccaccccgtctcagsatgcacactacccaccctcgcctgtctccccccgtgtcccccaccccgtctcaggsatgcacactacccacccttgcctgtcccacyctcgcctgtctcccttcgtgtcccccaccctgtctcaggcgtgcacactaccccaggttcctcccacccatccctgcaccgggcactcttccactcttcactcctcctaagttgtcctgcggggttcggccccatcgcccgcgtctggcgaggctagctgcacattctgtggggggctctggggggctcccagggcctggactccctgcccagcccgagaggcttcatggtgcagccttgactcttttcttgggtgagcctggcctccccgcagggtgtgcagaaacagacacagaacaaggagarcaggcacctggagctagactgtgagcttgggaggaagatgggcagcgaacgcagtgcggggcgcaggctggagacgtgagggggcatcagagcagcaggatcagccggcagttgtggcaggtgcagcaggagtgagtgggcgcccaggccagacaggcggggccaatgaagagaggggggcagccagccagtccctgccaaccatggctgactcactggcatccactgccggactcaggccccacctgatcagaggacaaacaaatcagatggagcagggccatggtcagggaagatggtgggaggtggatcctgagacggtgttgcagtccggcaggagggacgcacagcagctaatgtcactggcagtgcctgaggcctgaagactgcggaagcggagggacgttagcccgtgattctgatcacgggaacatcgtttagtaaggcgtttcccttttcacccggtgttgagatgttgatgcagtgcacctgtccactttgctgcagtggaaggggggtcccagagaccgtgatggagccccatgggaccctcctgttgacagactgtgaaggccttagtcccttcctatgagcatcagcagcgcctccsgggactgaaggtgccaatagggaagatggaaaggggtgtgtgcaccgggcgctgttcccaggacacagcctgtccagttctcttygctgttcttacacatccccagtcatatgttaattgttgtgagtgtcctttttttttaaccaaataatctttgcaaggagtaaaattcaaattttctgaaggttttgattaaaagagcttttgcagtaaaagtttcagataacagatcatccttctctgaaccgtattagagtggatattcatatgcgtttcatccttgtctctgagagtgaggctggttggtcaggggacggcacctggggcatgggagggtttcctgggttggggtcctgccaggartacgtgctctcaagagtagggtgtgggcagcaggtaagataaagctgtgttggatgaaatcaaactaaaacaaatgaaggtcaaccagctgggaatattgctagtgaagaactagcaaactcaatggaaaccttctttaatttttattttgttaataatagaggagccactctcttatagggaatggccacccgccatcaccatagctcatctgcccaacacatctgcacctgacttccgcgtctgcacctcactttcctggttcagtacacagtacttcatgcaaagagccgtttgccaacatcacagcttcyagcatccgatatggaaagaaggcgctttcactccacgcagaccttgcttgtcttttctgtagaatagttgtagaggataagcctgctccatgggtgaggcrgctgcacagcaatggcagattttgttgtcaccaccagaagcagaaatcacaaataacaaaggaatctagagacgtcagagaaatgggaggtcatagagcaaaaataccacccaaataccgacaaaaataacccattacatatctgaacattttagagcaggacragaccagcagtgagcatttgacccacccaaataccaacaaaaataacccattacatrtctgaacattttagagcaggacaggaccagcagtgagcattcgacccacccaaataccaacaaaaataacccattatgcatctgaacattttagagcaggacgggaccagcagtgagcatttgacctggcacaacctccgttcactcagaaacgcctgcgggtttgtatttcccaccaggcgtttgctaggtttggaattttcaaggtgagacaattggaccctttcccttacagagctttatgatctcacaggaagattaacatgcacacagatactgaacacacaagaacagtgtttccattgagatatacacaccatgtggcattaaatgtttaatctgtcataacacaaactttaaagttttattttaaatttttttaccaagatattttttacaagttggtgatgcacaagctaaataaaaagcatctcaacccaagatctcaggactgtgattcaagtacaacctttataactttcctgccaacttcaacttaatgagtcagatagttgcaagctggaggcttaaagaagcctgaattgtttgaggagaccctgaggagcctcggaacttgcccggccccaggaagtgaatcatcagtgcctgggaaacatctggaaatkgaaccctgttcggccctctccagtcacagtgcttaatcattcatttattgatttcaaataaatttactgtttgtggagctatagagcaggagacttttatcaagtaggagagtcccgtctagatagtaaacaattaccacttgytcctaagggtcttggaatatgggcctgtattagtccattcgtatactgctatgaagaaatacctgagactgagatggcctgggcaggctgtcctgcagcaagcatggcattgactcagccgccagtgtctgagcccctcaatgatgttcaactccatgcttagtgatgccttcagtaaatatttattattccaggcactgtgctgggtagcacaaagaggaataaactcctgtccatrttctcaacaattttataatctagagaggcaaataaatagggaatagatgaatgaaacaaaactaaattgagggagtctttttaaaaaattgagataaaattaacatagcataaaattaaccacttaaaaatgaacaattcagtggcacttggtacattcacaacattgtgcaactgccacctgtatgtaacattttcaccatcccraaatgcatcattttactttcaactttggatcckacgtgagtccctaaccgacagcatatatcccttatcttacatacaaagtataccttatcttaaatgcttgggacagaggtatttcagattttggatcttttcaaattttggaacattygtggtcatctcatatatgcagatgattggttctaagacacccgccccctgcaatgtgtaccaaaattcacgcatactcaagtctcaaagttggccctgcagaacccacatttataaaagtcagctctccgtatacatgggttttgaatcccacgagtactatattttcaattcacatttggttgaaaaaaatctgcatataagtggacctgcatgattcaaacacatcttgttttaaggccaaccggactcaccagttgagcttccataatccaaaaatatgaaatccaaaatacttcaatgggcatttattttgaacatcatgtaggcactcaaaaattttcagattttggagcattttagattttggacttttggattagggatattcaacccgtagttggtcatacttttaaaaatgtattctgtcagtctctcttttaattgktgagtttgatcccttttcatttacagtaatttctgttaaggaaggatttacttctgccactttgctgctggtttctgtatgtcttacaccttttttcctcctcagttcctcaaatattgcctttttttgtttctttgatttaatttttagtgtactgttttgattcccttctcattttcttttcctgcacatttctttttgttattttcttagtggttaccatgggaattacaattaacaccccacatttatcacaatgtagtttgaatttataccaacttagcttcaaaagcacacaaaaactgcttctgaatagcttccttcccagctttatgttgttattgtcacaaattatctcttcctacattgtatgctgttaacatagatttataattattgttttatgcatttgtcttttaaatcatatagaagacaaaaggaggagatacaaaccaaagctacaatactgggttttatatttacctatgtagttaattttactgaagttctttattttcttgtatggcttctggttactgtttagaatttcagcctcaatgacctgcatttcagcctgtcacctttagcatttcttacagagcttgtctactagtgacaaactccctcagcttttgcttctaaggggatgtcttaattttggcttcattttcaaaggatagttttgcctgatacagaattattggttgacagttatttttctttcagcacattaaatacatcatcccactgccttcaggcctccatggtttctggtgaaaaactgctgttgatcttattgacgatctcaagtacaagatgaattgcctctctcttgctgctttcaaatttctgtctttcgcttttgatggtttgatgataatatgtcagcatggatctctttgaatcaattctacttggagttagttgagcttcttggatatgtatattcatgtctttcatcaaatttgggatagtattggtcagtataactctatacatgatttcgtcagcttcctcctggaaagccagtctcgcccaaaggtgctaaaacagggttcctctttgcactggtttctcaaggaaccaccagacagctcaaaacacacagccacagttttttgaaaacaagatccatactgccccctggtaccaccacatctcaccaggaacttaggccaccaatcctgtagctgctgttgaactggggaatggggaataataggtgggcaagcaaaaaccacagaatgtcttttaaccaaaatttagcattctctttctcaatttagcaccccctggttactgctgatttttaaaattagactacagaatcccagaacagtcacttctgtccatttttgtcagcttacttgttacttcagtggagggacagatccttggagccacctgctctgtgatktccatgtcactactcgacctgatggagtctttggcccacttggaagaagtacccctttgacagaccttttcgcatcctgcccacatcccagttgcccaccctgtgcctcccttcagctctgcagggcagctcccatctatgctgatggctccagccttaagcacctgccttggtctgtctgagctaagcagcacactagcccacacccagggcaggccagggctgctcaggagttcacctcttcagagagcaagggatgggagtcaatggatagagacccctgattctttgaccctcagacgattcaaggcacatcccacatgcctctcagagggtctccggcagtgtcgggccccggccgtccacactggtggtttgtgcatgtacttcatggcttccgcccttctcaggcttactgtcccgttctctcacttggcttctgggatcatcctccaaataaattacttgtacccacatccttactgcaggatgtgattttgtggacaaaagtaacctctgccttaattcttcaaagtgttgaatcccacagtggtgacaccatccctgtggctgctggcctaactgatgtaaatggctcagtccacagggcccttacacagatggcccaggcagccggtggaggatcatcctgttcctgcaagcttacgtgccctcaggagctgctgtgggccttcacatctgggctgcatgctgataacaaagcctctcacttgtttccagatgcatcaacatggtgacatgcagagtctttattttgggacaaaaataggcatccatgaaatggtgtgaacaaataactattcttggcctcagtgatttcattcagtgcataaacagtatttttcctgctgaatttccaggattgaggaaactcttgtctctcaggaccagctggattttacttttttttttttagtgtcttctcaaacgcagaaagagctacaaaactcccatgaggcatgggccagctgaagaggcttcagacagttgctttggttgtttcacaagactagaaaagtgtggttgcttcttgcctccagaccgtattatcctgcctcaccatcagctgtttctgccacctcaagacaagaggcaaagtgggaaagagaagtttgaaaccaggagcttctaagtttgcctgagtcttcaagggccagattaggaatctttagccaccaggctcacactgtcggaactgagaggtgggacagctgaacagaaaggcagaatcttccagaacctggactgggcccagcaagcagggtagggatgtccaggaagggggaaggcacccagcttggctcctgagaatgccccagctgttggtgacccgtcgtctgatgggacaactgaagccaggaagtggtgtggctggacttgctctttaggaagcagactttgtggaggtgggaaggcggcaytgtccaagctggaggcggcattgtccaagctggaggtggcattgtccaagctggaggtggcatcatccaagttggaggtgacatcgtccaagctggaggcggcatcgtccaagctggaggcggcatcktctgacttggaggcggcatcgtccaagctggaggcgccattgtctgaggtggaggcgacattgtccaagttggaggtggcattgttcgagttggaggcgccattgtccgagttggagacggctttgtctgagttgggaacggcaggttcaggggccaggtcactgagcgggagaagagtgaatgggttggagaaacatccacggggaaagatacattgatttgtcagacgccaggatggaggagcagtaggatggaagggccttcagaggcaggcggggggtcttcgggacacacggggtcagtgtgcccatgggggttggccgggagcagctagcaggcggaggctgtgagtctggaaggagaacccagtgcaggtggggatgtggctgctgcgaatgggtggggttgaaaccatgagggctcatgaggtcactctggcaggaggtgcctggggagggaggagtcagccctgaacacccagcacyggggcctccgcatccctgcacggatccctgctctgtctctgacctctcaccgtgttcctcccacactaaacacatctccatctcacacaggggctggtccgaggcctgactcggtgagagcaggaaaatgggtagagaggcagagtgctccagctggagcagatgagcgatcatggtggggtcacagcactgggagctgcacaggctccattcggcacggtgtttatttcagagtctctgtttacygtataaatactaggcaggattcaggagttgtggactgtggactgtgtagtctgtgttgtagacaatgcctgccccccaagaagcatgctgcttcccagctgatgagcaagggcagagctggccaggtgcggctgcctgtcccaacagccccttggcttagagaagagaggggcacagctctcatccatgcacgtggacctgctggacagtggtcactggcctggtgactaaaaacaactcccttctcaggacttttgcctctattttggtgttccagcctctgtggacatagtttgaccctcttaagactatttctaatcaacatgtctagggatgcttctgatttaaatgttatgctttcaaacaattattatatttgcagcagtgcggatgcttgcaggaagctttttccatgaaacttttttaaaaagaagaattttccaatagatccttttctcacaaacttaggtttctctcgataaacacatatttgtgccacttaacacattaattcaaatgaattgctctaccctgcattgtattgattccaaggttcagtcagtggtgggagtggtaccgcccccgcttgggtggtgggctccactgaccgagactgctgggccgtgtgttggttaagctggacatgaccgtgggggcaggctggcgttcgcgacgaaccatgctcaatctttgtcaaatgccgttagaatccttttctgtggcaaggaaagagagttccgccttccttccctgtgaaggtgtttgctgcatgaaggccgggcatctggagcctgtcctgggctcggagtgtctgtaattgaagtgatagcagcttttgatacttactggaaatgtcaaatgaagcccagtgctcccttagaaacattggtttaaaacccttacaacgtggagaaaagtggcagaggaagaacaagattgtctgaatgcatttagttaaaaacacataaaaagatgaactaccagaaaaataatagggagtcaaaacagatacaaaaacactaaaaggggatggtgtagtgatcaacttgacccttagacacctgcggcctctgtgaacttccatcttcctgaaaggagacaggagcttgacccagggaggctgagccgggccttccatggaatggcacttcctcagcagaggaggcgggggcttcggtgtcctagaggggccttggcgtcagggtagggagcgcttggcctctgggagctttggcatctggggaggacttcagtatcctgggggtggggggcttccttggcatcttgggagggggtttcagcatttgtggaggactcagtctggggatcctccatgttgagggagtctgggcatctggggtgggtgtcttggtgtccagggcctcctcggaaccaacaggtccaggagcagggatggggaggaggtgggggctgaagctggtgctgtgctgagccagcagatgcttcctgtggagacattgttggatttcaagggcaggaagtgattctgttggctgtcactgaatttaaagggtgtagcctttgtctaagtcggccattcagaaaggaccgtctggggcatgggagggggcatgggaagtccctgagaccctctgggggtccgcagagtaagacattttcctagmaaagccccaaagttctttgcctgtttatcctctggtgagattctgcatcgcttccccaggctgtgagatgtgcgaggatgcggcttcgaggctagtggaatgtgtgttgtgtgttcttgggtctcgagaactcctcctttgaattttggagcagtgaatagtggtagctacagttatgaatgcaaaggcttcctggggccaaatttttaagcctgaagatgctgggagcaccaggcccggccctcctgctgtgcacacctgctgcccatcacagagctcggctcttgcagatcctcgtcaagtgagggcatggaaatgccagggatgggagacggtgtgtttgactttgggagtgaagcatggagacccagggcccagttaggccacagtgattcaggctacgcagatgaaggtggctggggtggcaccagtgggaatgaaaaggaaggacaaggttgagcccctgccactgcctgtcatcagagatggcaggaggatgactgataaccaagccctccttcctagaaaaggtgggggcagttctccgtgagcacagggttgtgggggtgtgatctggggaaagacagtgagggactgggaggggatacacatcatttttagacacttgcgatgtacaggtgaacgcggagaagttggggtctggagctggtggagtcatattccaccagctcccagtctcaatgagaggattctctgatcatcgctcctgcttgacatctgaaaaagaactcatttgcatacttcccaagagtattaccccagcagcattttgtgtctgtaaagatataaacattctgtgggagcattttcaggacattcgctgaggctgcctgactccccacaccaacacctgctgtgcagtcagaagtcacagtgaggtgacacgcagccctcagatgcgggagcaaaactagggtgaaggctgaggaccccaccgtgggctctgagctgggagcggccaggggccaggtgctgcttttgtggtgcctcaagatcacctcctctggaaaggcgtgccgaggactcccgtgtgtggagggtgggccgaggacccctgtgtgtggagggtgggccgaggacccctgtgtgtggagggtgggccgaggacccctgtgcgtgtggaaggcatgctgaggaccctcgtgtgtggagggtaggccaaggactcccatgagtgaaggtgcactgcagacccccatgtgtggagggtgggccgaggacccccgtgtgcgaaggtgtgctaaggacccccatatttgaaggtgtgctggggacccccgtgtgtggagggtgtgcygtggacccctgtgtgttgctgcaggggaccaaccacttagcaaaagtcctgcagagagcgctgtgtcctgtgaggagatgggcactcagcctggccacacagtgaggcttgagcatggagattaggtggtgaaggtgggcagaggcctctgggagggctattgggagggagaccttggcagcagctggccacatgctgaccccactccatgcagagcccagcatagggagtgtggctggctctgggagacctgcactttcaggatggtcctagccctgataaaaattacagagatcttttatacacatgcatggacgtatgtccctgcacagayggccaggagcccctctctgctaactcttacacagtggcttgctgtggctgctctggkttcaagtacccagagacctgggtctactgaagaatcgcttgcagtgtcatgggggagggagttagatttgcagtgtcacggaggggggagggkgttatatttgcagtgtcatggtggggaggatgttagatttgcagtgtcatgggggagggtgttagatttgcagtgtcatgattgggagggtgttagatttgcagtgtcacaggggagggtgtcagatttgtagtgtcgtggtggggagggtgttagatttgcagtgtcacaggggagagtgttagatttgcagtgtcgtggtggggagggtgttagatttgcagtgtcatggtggggagggtgttagatttgcagtgtcacgggggagagtgttagatttgcagtgtcgtggtggggagggtgttagatttgcagtgtcgtggtggggagggtgttagatttgcagtgtcacgggggagggtgttagatttgcagtgtcacgggggagagtgttagatttgcagtgtcatgggggagggtgttagatttgcagtgtcacgggggggtgttagatttgcagtgtcatgggggggcgttagatttgcagtgttgtgggggagagtgttagatttgcagtgtcactgtggggagggcattagatttgcagtgtcatgggggagggtgtttgatttgcagtgtcatggtggggagggtgtcagatttgcagtgtcatggggcagggcgttagatttgcagtgtcacgggggggcgttagatttgcagtgtcttcggggagagtgttagatttgcagtgtcacggtggggagggtgttagatttgcagtgtcacaggtgagggtgatagatttgcagtgtcactggggagggtgttagatttgcagtgtcacaggggagggcgttagatttgcagtgtcacaggggagggtatgagatttgcagtgtcaagggggagggtgttagatttgcagtgtcacaggagagggcattagatttgcagtgtcacaggggagggcattagatttctgtaacagtgagaatttctaggcttcttcatttcttaatttcagtatttcaatgtcacagagtcaactgtttataactttgcctcttgatggcacaaaaaagagtttgctttgaaagtaaggagcacagaccttataaaatttaataataacactaggaaggggagagaaaagaatctgcactgaggcttcagaaaggagccggggctgagttataaccaagttctgaacaccaccatcgctgacagaccactagatgggaactctgaggatgatgcccagaaggaaatgtgcagagaacatgtccctcaggacctggactggaactcttgacaggggctcatggtcataccaacgggggcctctctgctctcaactgcccatgcagcgacgccttcctccactcaggtcctccctgctctctgctgcccatgcggcgacaccttccaggacctgggtactccctgctcttccccgcctgtgcagtgataccttcctggacctgcttagttcattcaggaagcattgcctccactctgctctgtgctgaggtctcacaggccagagacctgtggcatttgtagacacatacgtagcaaccttctccttctcgggtgcccagtacccagccaaatgcacctatccaagggcctagcaaaaccaactgctaggcaaacacatcttaaaagccctggtattaacacaggttgtaagatacgccagagggaagctggactgaggagttctgaggccaactctgtctgtctggtgctgagtttcagtagacactggacgatggggttgaggcctcagggcctcacctttgctaacccaagattatgggttttggcaaattaggttcatatgcakatgatggccccactggggatgtggctgtgtccacagggtgaatcctggcacttggtgagctccacccacaacacacagcactgagagtgacctggtctgcagatggctgtccagctctcctctcctgcagccagaggcctggtctctagagcagctctgttctagcactttctgtggcaacagaatggcccacatgtgtgctgtccwgcaggacagmcaccagcccctgtggccgctcagtgatggaaaccttgctagtgagacaggagacctgcgtgctttattttatcttattgtaattcagaatttggatactggaaacctcgctattgaggtggggacctgcgtgctttacttaactttatctgactgtaattcagaatttgcgtgctggaaaccttgctattgaggtggggacctgcgtgctttgctttactgtatctgactgtaattcggaatttgggtgctggaaaccttgctgttgaggtggggacctgcatgctttactttactttatctgactgtaattcggaatttgggtgtgagttgatgtggctgccaccatgcacaaggcactgcaggggctcgtagcccgtgtggatcatggacaagaagtttgctctgatgctcccaaagagccccactccttacttcagcactgatatgagcatcttgacaccggcaggttgttttctgtgggccactccggtagatttaaaaccctcccttttactgccagggttggatcatcctacataagcaccaacaccccaaagggtggttctttttactcaaaaacaatcatgcttagtgtactacaaggacaatgtatctttgatattaaagagaatttttggaaaagagcttcctcaaatctcatcagtttaatgcaacttaaacacgtcacatttaatttgtctatgtggtaagactaatagtaaaaattgaggtcttcagtgcaaagcagatctgggttcacatcytrcctttgggtgttgttgtgtgaccctgagcagacaggcagcctccctgggcctctccttcccatctgcagagggtgggcagtggtctgcacgtggcatggctgggcctgcaggtctgcttatagtgtctacccctcacatccggccctctcctgtgtccctgctgagcagcagctcaagaacctttcagcaggatccccagggcagaagcaggtgcctctgagagctggcagggatgacactgcaggcatgtgcagctgtcccatggctgacvctcctgtgcgatgtctcccctgcatctccactgcagttcagatgtaatttccaaccagtgggtgctgcagtttttctgagacagccaactrttcaaagcaaaggaaacctttcataaagtgtaatctgtgcntgcatttggcagcaccatgcggggggcccacttcgaggtgacctcctctcaccagagcactgtgccctgcagtgggtggctcttagctttgaacagccggggttcacattgtgcagaaaaacatacttagatggccccaccatgcactctgcttcagatctgagtggctccgcatgccacattgcttctaatttccagcttgacattgtcaaaggaaaataaaacaacagagagagagatggggaacatgtcacatagtcacgaagattcccatcacaggggttgcaaatggtgctactgaacagactgtcctggggctcacgtcactaggcacaaggggatgggtgacgagcagattgcagatacgcagsackgttcagacagactctgtggtgtctttgtaaatatgaatccattcatccttttctagctctttaggccaacaggcagttggcctttccaggccccggctcaagccaaaactcagagaggccgcacccgctctcagcagctggtgagagtccggggcagaacctttgcactgaagagcccctgcctggctttttaagcggcttctcctgggtgggaaaggtggagcggccgcactcgggagcgctattgtgagagacatgaagccacaccgcacacggctttattctctcatccgatgctgagtgtcttctctgtgcctgacaacagcggcttagtagtagctgatgcgatctgctccagacatcaagggcttgcctattcccgcacctttcatttcttcagtgaattgctccagtccccacgtgctcagttagacggaaattctgtatccaccttcaaaaccttcctcttcctttccccagcacagcttactttgggtaaataagcaaaagctgtttttctaggtggtccagccccgtgtggacctttactcacctatgtgtgccagctgcaagttcacgtggtcactcgggctaaggacccaccacagccatgctcacggcaagttccaggtgcccagatgcagaaggagcataaagatattgtcagacccacggtgttcrggggtccrgagggcttcccagagaaggtggcccaggccaagtctgggagatgaagagaaattgccccagtgaagggggttgacatgcgggtgagaggggcaggcagaaagacattctacaagagaaaaaatactttttacagaatattgcagaaagaatactttttacagatgagaaagaggctatgtttaggaaaattcccatgactggscatggcggaaagacaggggagaggtgggaaaatggcatgaatgaccgaaaggatggcctcatacactccctgcgaacttgaaaattctccagagggcatgaggagcctctgaagagctttgcacagggctgcacatgtgttcagacctgcactgtagaaccccaccctggcttccgagtggaggagacacgggaggtgtcagacctgcactgtagacccccaccctggcttccgagtggaagagacacgggaggtgtcagacctgcactgtagaaccccaccctggcttccgagtggaggagacacgggaggtgtccgacctgcactgtagacccccaccctggcttccgagtggaggagacactagaagtgagattgagtggtgctcgggagaacagggagaggtggtgggaatccaggagacagaggtgcctccgtggaagagaaacaggtggggtggccagagagctacagggaggatgctcgcrgggcctggtggagtgagggacacaggcagaggggaggaatgagcccagtagagtctggtttgggatgtcgtgtgaacgtgacaggggcacagagcccataatcgatagcatctcgtcacctcaagaaagcagagagcttcggctcagtcagtctcagtcttctctaactagttgaggcaaaatcaattcagacctccagtggcagcagtgaagctcagtgagaaaaaattcaagcatcttgtactagagaaccatggcagggagggaaagtggggagaatgtgtctgcatttgctgtagtcatacacctacgatcggttcactttcggattgcgaagcacacaggacagaatggcgttgctgcaccatgaggatggctagacccccctgagggagcgacacagatgctgaagatgtctaaaccccccctgagggagcgacacagatgctgaggatggctagacacccctgagggagcgacacagatgctgaggatggctagacccccctgagggagcgacacagatgctgaggatggctagacccccctgagggagcgacacagatgctgaggatggctagacccccctgagggagtgacacagatgctgaggatggctagacccccctgagggagtgacacagatgccgatgcctcccagggagctccaattttaaaagcaaggagtggactgtcaccaggttcctgtgatgtacccgccaatgttcatcttgcagtccaaaattgctaaacatgttaagaaacaggacattaggacccataaagaagagaaaagaaagtcccaatgatacagacactgaaatcaaccagacaaggacttaacaacaattccagatctgttcaagaacgtaaagggaaagacggagaagaggggacacgtgggaacctcagcagaaagatggaggccgtgcagaagaaccacgtgtagattttagaaaggagagcttgtaagatgggaaattcactgcatgggctttacagcggatcagagactgcagaagaatgaattggcaaacttggaacagatgcacagaaatgatcgcatctgaaggacagagaaaaatgccagaaacaaaaaagagcccaggtggcctctaggacaaagtcaagtggtctgacccacgtgacagttccagaagatgagccaagaaaggtgggacacaaaaaaagaagaattaatattcaaaaccagcaaccctacccaccctccacctggtgaaaaagaagaagctcagagaaccccaagcaagttaagtgcaaagaaaattaacataagcacatttgtagtcaaattgctaaaataccaaagatagaaaatcttaacagctgggaggagagacgttacattcccaggagcaatgatatgcatgaggactgacttcattcttcactagaaacagcagaaaccaggagacaatttgacaactctttaaggttctgcaagggagaaaacaaaagcccagagttctatctccagcaaaaacatgtttcagcataagggtgaaagaaacctgctttcgtgccagcccatcccgagagaatctgccatgttagacctgcactgtacaaaatgctgcggacctcttctgactgatgggaaatcacagcagttggagacccaggtccacaggaaggatgaagaacccaagaaatggcagcagactgagagcttctggaggaagtgagacagccctgcaggctctgggaagcaggaggtccaaggccggatgctttgctcatcatcgccaagtgaagagtccctgtggcagagcaaagatcaggtcagagtggaaatkaaacaaatgtgattcttttaaacaagtaaaaattgaagtggagtgttctatactatagtgggaaaaaattctacaagccagaggcttccagtcaaatgtgcaaatgctatcgaggtgagccgatgtgccagttgactcatactggttcagattttctttccctctctctgctcccatggctttgttgaaggcgcataaaagataagttgcccacacttggcatctgtagccatgaatactgaaatcttctcacattggaaattctttatgttaaagtcaaatcaattcttagtactacttgattcagataagaatcattgatgctaaaatgagcggccgatattctggagaaccacagaatagctctcaccacaagataggatcagaagaaaacagcattcacggtgcagaaaccaggcaggcagcgcttaacaagtgataccagtgaacgtcaccagyggcargatggatccgcacacgtgcccttgagctgatgcacaaagaacacaaaagatgatgtccctggtgttctcgacaaagagcaaaacccagtctattcctgaggcagccacggtataccagccaaggagcatggtgcaaagtgactcacccctactttaaaaatgcaaatcagtgactcacccctgctctaaaaatgtcatttagagtgactcacccctcctctaaaactgtcaatcagggtgactcatccctccactaaaactgtcaatcagagtgactcacccctcctctaaaactgtcaatcagagtgactcacccctcctctaaaactgtcaatcagggtgactcatccctccactaaaactgtcaatcagagtgactcacccctcctctaaaagtgtcaatcagagtgactcacccctcctctaaaactgtcaatcagggtgactcatccctccactaaaactgtcaatcagagtgactcacccctcctctaaaactgtcagtcagagtgactcacccttcctctaaaactgtcagagtgactcacccttcctctaaagctgtcaatcagagtgactcacccctcctctaaaactgtcaatcagagtgactcacccctcctctaaaactgtcaatcagagtgactcacccttcctctaaaactgtcagtcagagtgactcacccttcctctaaagctgtcaatcagagtgactcacccctcctctaaaactgtcaatcagaatgactcacccttcctctaaaactgtcaatcagagtgactcacccctcctctaaaactgtcaatgagtgactcacccctcctctaaaactgtcaatcagagtgactcacccttcctctaaaactgtcaatcagagtgactcacccttcctctaaaactgtcaatcagagtgactcacccctcctctaaaactgtcaatgagtgactcacccctcctctaaaactgtcagtcagagtgactcatccctcctctaaaactgccagtcagagtgactcatccctcctctaaaaatgccagtcagactgactcaccccgccactaaaactgtcaatcaggatgactcacccctcctctaaaactgtcagtcagagtgactcacccctcctctaaaactgtcaatgagtgactcacccctcctctaaaactgtcaatcagagcgactcaccccttctctaaaactgtcaatcggagtgattcacccctcctctaaaactgtcaatcagaatgactcacccttactctataaatgtcagtcaaagtgagtcacttctctaaagctgtccatcggagtgactcatccctcttctaaaactgtgagtgactcacccctcctctaaaactgtccgagtgactcacccctcctcttaaactgtcaatcagaatgacactcctcctctaaagatgtcaatcagagtgactcaccccactctcaaactgtcagaatgacccaaccctactgtaaaactgtcagagtgactcaccctactctaaaaatgtccaagtgactcacccctactctaaaactgtcaatcagactgactcacccctcctctaaaactgtcaattcaagtgagtcacccctactctaaaaatgtcaaagtaagtcacctctaatctgaaactgtcaatcaaagtgactcaccccattctaaagttgtcactatcacaaagaccaagaaagactgaactgaaggattttctaaattgaaggaggctagagagacatgacgtcggtatgcagggcctcatgtgggcatttattttgttctagaaatgttcttgggagaagtagacaaatcgtgtaagttctgttgattagatattagtaccatatcagtgtgaatttttggttttcataactgtactctcattatgtaggagaatgcctttgtttttaggaaataagcactgaagtatttagaactaagggaaaatcatgtccataagtttctctcaaatagttcagaataataaagcacaaatatcagtgtaaatataaatatagagagagattttgcaggtgagagtaaagcctaaaatgttaccatttggagaatcgggtgacragtgtctgagattcttgtatgatagtcttacaacttttctataaatctgacgtatgttaaaataacatatttttaaaggggggaggggaagcaacttagagtaacaatagaaagccatgaccaacctaaaataatttctcctggcggtggtagaatcccaattttgtgcacatgctcrtgctcaggagaagctctgccatgttgccccgccctgcacrgcagccgtaattcctactgaagcccagamcgcagtctatgctaagctctagtcatttattcaatttagcttaccaaagctacacctctaactgtctcggtaactcactgaaaatgtcccctcgtcatgtaagagccagagcttacctgcatttttctgatgcatttgtgactcactgagatgcctctgaagcccccagaggcttgtgaaacagttttagagttaatgctctagccccacacgaaggcatgtgcctcctgagaacagggttagattaagaattgagctcacatttcagtcacttttctttcagtgcctactcagcgtgtgatcggaagtagactgggttccgtgcctctgttgtgctgacggctctgctcaggcctgattgggcctgccctttcccgggccaaacgcctcctcactggacctgcctggaagcagcagtgcccactggggccctcacccctaccccaagaatcctgcatgagtcacaattaattcttattagcaagcgacagaaacctggcctaggcagcaaatgtgcttatgaaaatgtattagttaactcgtggaattgctgggacagccagggaaccagctcagagcagcctgggagatgccagccaccctatccgtgcgtgggtgcccttctgcacaatgccaggcaccgcagctcatgctgcagtgctggagccatggcttctagaaacctcgtctggctgcagctcctgcagcggcagaaggagttcttgactcagagtctgtgggagcctctgatccacaggaggcctgtgcactggaggtgagacaggggagagggctgcccttcagtgcagcctcttagctgctacagcgggaagctggttctgcctcttgcgaaaaacaaaaaaaaacgaaaaaaaattatcaaaatgtagggaaggcaatatacataatttaggcagccaaaaataatttttaacatttccataaaaatatacatttcatccccaagcagcagtgcctgtgagcagcctgggaagtgtggcacgcccactcccatgttggctcacctgtggggctggtgccccaggaagctgcccgcttacctgccccagacccagctttgcccaaggaggctctcaggaacagggatggtattggcagggatttcaggcaccacctcagggccaggggcagcaggagaagcaaagaaaagaaagccccccttggcaccctccggtgctccaggcagggctgatggtgctcacgacggtcacgtgtgtgtgcttacaaccccctgagcttcacacaggaaatggaaaacacttcagctggtgccagtgcagaaacctgactccagcatcctgggaaatgattgcaccccacaaaggagctaaaagcagcagctgagagaccctgaacagagaccccctctcaggaggctgcgaatcacgagrggcaccaggratgttttattatgcaacgtttgtgataaaataagagtgaaccagactttcattgccatcacttaacacgctgtatgctattaatattttagaattgtggtcaagtgaacctgggggaggagaagcrygggacttctagtttatagctcccaccctggaacctgccaggtgccccaagacacccctctgtgggcctcgtgctatctctgcaggaaggttccggaaaacatcttgaggcaaactataaattgcatttgtgatgtgattcaacaggctccgaaaaacagtgtgcacgatggcatgattattacagtctgcgtcacccakgctgagcgacrggtgatggcccagagctgagcgtctgagctgggacgggtgtctaggtccaggcttggayccgctgatgtggactgaattcgcttcatgcctggccccaaggcagccagcgcgttggtgggggctgccttcagattcattacaataagcgtgccgacctccagtgcctggtgtcccgggaacaccaccagtgggcactgggaaaggttctgcattacagggcacttggaaagactcccttctggcaccattcatctcaacagcagcacagagctcctcacccctgtgaggatgccgcccccacccgagggacagggaagtcttacagtagagacagaggaggctggtgaatggagatcagaggattgggaataaatttgatttaatgagggggaagactgcctggaccctgaaaggaagatgggaccagaggtggcaaatgtggtaaaaggaggggaattccagggcaaaaactatgaccagcctctgttgggctgccaggctgcggcrgaggctgtgctgggtgggcgtctgagcttaagcatgggaaacgatcyggtggcttcctcctaaaaggaacaaaccgaggactgaagccctcaggagtcgcgccagggtctcccgrtgctgcaggaacccacagaggagttgacatttgtgtctcctgaatgcctgtccagcatccccaccgtaaggcagggttgctgaaggtagtcagaggagcagagagcggatggcaggctgccacggcgtactggggaagaggggctgtgggttatggggagggggtcatgccagggacgaccctgccttcagcatttgctaacgcagcatgtgttgaccagctggctgacacatatgccagggaaacacaagggtggaaggaatggtctcaccrtttcactgatccttatttcacaaccttcagcaagacacctggcaccccgggaccccactctcctgcctctaaagtgggcatgtgaggttaaaccatctccatgtcccctcctgccctgacgttctggacgtggggtggctgcattctgagcatcatctgcagcctgtcctgccttgtgtgctgccttctgtcccagccctctgcctggccttctgtgctgccctccctcctgccccctgtcccacccccccatcctatcctctgcactgccctctctcccaccctctgccctgccctttctcctgccctctatccctgtgccctgccatctgccccgctctctctcccatccctatctcccaccctctcatctyccaccctctgcccccctccccaccccacccctatcccgccctctgtgctgccctctcttcatagtcggaacttgcactcccagccctggtgcttcaaactcaggtggtctcagattgatcagcttgtgagagcctggtagtgacgctgagacacggggagtgtcctgggtggcttcgcaatctcttttaccaaatgtgttcaggcagccagttcctttgggtacagtggacctgggggagccagttgaggctttcctgaatagcaggtccatcccaccatcacaagaagagtgttcagggcctaccatttttctctttggccccagccccctaaacccagggaaaggaaccagaccagttctatctttctcagggaggctgggygcatcctgctggctgtgggatckccaggcgaccaagagcagagaggcctgatgccrcccgctctactaaggaccacccaagccaggcagttagtcccgggggcagcatggctgagtgtgggctctgggtcgggtcctgtatctgcctatggccctgccctggttttacggtcttgggtgggcctcagagtcctcatctgcaccttccttytggattgtggtgagagttaaacgtgtgaattcacataaagtgctgcaacagtgcatgttcccagtaagtgctctataaatgccacctgtcatgttcccagtaagtgctctataaatgccacctgtcacgtgtccattgcccacagagctccacagtccctctaagcgtcgggcagctctcctgaccccagccctagtttgcaaaatggaggtagtgatgtgcacctctcttcttcatgaattgcccacaagcgtgaattgtagaccctcagctgtgaagggtgtgcgtaagaactcgtaaacatcccagtctgctcagcctgacctggtcacaaaccccagagggttcacagcagaactccatggaaaatgctgactcctgcttggaggtaaagcacctgtgctttaataaaacctcgcttccctcctgcttcccacacaccacacatgcccgtgtgcactgagtgatcccagcagacatgaggcctctgctctcagacgggtccctggggcttcctgtcttcggggtcccagcagacatgaggtctctgctctcagacgggtccctggggcttcctgtcttggggtcccagaagacgtgaggcctctgctgtcagacgggtccctggggcttcctgtcttcggggtcccagcagatgtgaggtctctgctctcagaagggtccctggggcttcctgtcttggggtcccagaagatgtgaggcctctgctctcagacgggtccctggggcttcctgtcttcagggtcccagcacacgtgaggtctctgctctcagacgggtccctggggcttcctgtcttggggtcccagaagacatgaggtctctgctctcagacgggtccctggggcttcctatctttggggtcccagaagacgcgaggcctctgctctcagacgggtccctggggcttcctgtctttggggtcccagaagacgcgaggcctctgctctcagacgggtccctggggcttcctgtcttcggggtcccagaagatgcgaggcctctgttctcagacgggtccctggggcttcctgtcttcggggtcccagaagatgcgaggcctctgctctcagacgggtccctggggcttcctgtctttggggtcccagaagacgcgaggcctctgctctcagacgggtccctggggcttcctgtgttcagggccccagcagacgtgaggtctctgctctcagacgggtccctggggcttcctgtcttcagggctttgcttgcagacagtgagccggtgtcaggatccctgcagccacacgtccagatgcagggggaggcgactcttacccaacagcagtgggggccatggagtgtccagcaagatcagggtgaaggatctccagggctgcagggagagaggctacttctcaggtctaagcaggaagcaaaggagcagcattttacagggkctgtgggtgtttgtgagtgaatgcagctacagagtgtttagaggaaggggcactggagggtgcgtaggaggcctgggatgcagggagtcccgcccagttactcaggaacacacagctgtgggcaaggccctccctgcctccacttctcatttaggtaatattaaaataaattagatgatctccagaatcccttcttgctctttaaattgtttttaatttggcaattattatctcacatggactcagaatttgatgagatgcatttgaaacttctaatacagaactggcacatagtagatgctctgagaaaggggattttcatcctcagcttcctgtggctgtggtttagtggtggacagacagagggacgtgacgcatggaccctcagtgtactgtggctgtggtttagtggtggatagatggaaggatgtaatgcgtggaccctcagcatactgtggctctggtttagtggtagatagatagagggaggtaatgcatggaccctcagcttcctgtggctgtggtttatcagtggacagatagagggaggtaacgcgtggaccctcagcttcctgtggctgtggtttagtggtagatagacagagggaggtaatgcatggataaaaattaaattcatccattcrcctcacatgtagactcaaaagcttaataaagtctaaactaattttccataattacagtgcaaatactgaaaatgataacaaaaccataaaatatattttgcagggaactagtttccttatctctgggagaagggttttagaacgacacagaagaagaggtgtctgtggaagtgttttctgaggcaccgcgctttgaagagtggcccgtgttttcctctgtttaccatcacgtcactggttcctgattgtctcggtggctggtgattcrgcgtcgtttctctgtgacgcgtctctaggactgaccctgacccacagctctgggttcacctgcaagctggcttgaacagctggaccttctgcatcagggtctgcattttaacagggtccccagcggctcctgggtgtgctgcccatctgaggcccatcactctgtggccccatgcggtttccacgtggcctgaccgagtccactgctgaccacctcagaacaggcagtgtttgcctgcagccaaaggaagctggagggagaggggccaggccaggttgggacccgggaccacgaggaaggtgaacccatgaagggctattstgacagccgtgatttggacrtagcaaatgtgggcatttagattttggggattctggaagattctggaggggatttaacctactaaagcaacgtgctaaatgcaggtgcctgcatcctgactacatatcaataactgcatttgcctgacrtgctaaacgcaggtgcctgcatcctgactacatttcaataactgcatttgcctgacgtgctaaaygcaggtgcctgcatcctgactacatttcaataactgcatttgcctgacgtgctaaatgcaggtgcctgcatcctgactacatttcaataactgcatttgcctgacgtgctaaatgcaggtgcatcctgactacacttcaataactgcatttgcttgacgtgctaaatgcaggtgcctgcatcctgactacatttcaataactgcatttgcctgacgtgctaaatgcaggtgcctgcatcctgactacatttcaataactgcatttgcctgatgtgctaaatgcaggtgcctgcatcctgactacatttcaataactgcatttgcctgacgtgctaaatgcaggtgcctgcatcctgactacatttcaataactgcatttgcctgacgtgctaaatgcaggtgcctgcatcctgactacatttcaataactgcatttgcctgtttgagcttcagtggaggtgttttcatcacctaaagctggtgagaactgtgcatctcagtcatgggagttgggtgagcagagggtaccgtgccaagtggcataggcagtggcctcctggctgactcggcaagtctttaatccacctgcagcggacttcttaccctgtgtacctgaaataaagcgaggtgtcctccccgtgcatcctgtagattccacatgacctgttttccagctcaagaatgggaattgctatccctggcagaggtcaggaaccagctctgactctgggtggcacctgggccagtggtgagcagggccctgtggatggggcctttggaggcgtccagggtagggagattccatgactcagaaccagtgtcgggaggagcagctgagctctrgcaacagggctggtggcctcggttctcctccaggggctgtgcacctcgccagctgcaggtcagagggggcgtcctcagctttgagcccagggccgccctttctgatgttccaatggacagtgtttccttacaggtggaggagaaaaggagaacgagtgtggcttcaatggagccagccccaggaagccacatagacctcctctgccacccctctacctgcctgtggccgcgccccctcatcctgtccaagtgaagaggccatggatgtgatggccccaccctgccttctgaaacactcaggaccgggccccctcctccagctccccagcgtgacacacaaccttgccatcccccattgtcccatccctgccgtctgctatgggtgcccatggggtctcccaaacagcggtatccagaatggaacacagtgctgagatacggtccaacccaaacagcacaccaaagccagcctcctctaattcaggacaggttgcttttttaaattctgctcaggaacaggtagatatgttagcaaccattttgcaaattcaactaaaatctccctgagtttagcaaaagaaccatctcgggtgtgaccgctaacatcctacactaacactgtcgattcctgaaaacacatttcttatctaaaggcagagatttctctttatctcaggaaaatttcctcttgttggtttctgggatcagagtttcttcctggaccatttgcagcagtgacagcctctctgagtttctggggttttatccrtcagttgagggaatgggatggaagccatcaatggtctgacatttggacgtttgcccccaaataatttgagcaaagtcttccaaaggaggtctcgggcctgtctttgaaggaactgacacaggtggaaagacggggatgatgttctttggatttttccaactcaatgtgatgtagygacaygtgctctgcctcgygaggggaaagagctcccctccacaggccagcgcgcaggtggcgtttcccgaggctcaggcaggtggagcatggttggatggtcccagggggctggctgccttcttgccctgccagaacacacccacctgttgttttctcagtcacaagcatcataacttatggctagctgctcccacctcacctgcactgactggctcataggaaaagcttctggtgacttaagtgatttttataggtcagggttaagaataaaaaggcccagtggaacggcgtctctaaaagcatgcagtgtagggtgttgggataaagataaaaaacccagagtgatgttttatttatagacctttattgacacacacagcctaggctaaattttacattaaacactggttacaaataaatgtgttcacctgagtaaacagcctctggggtctttattaaaatggctttaaggagaaggagggatgtttttagctgccagtggtaggagacagtggaaggatggctggtcccagagcaggcttgccactggtggcatcatttgtaatatatattttcattttgctctgaagyacagcaaataggtttttgtaagcgagtgacctcaggattagctgtgttatttgtgacttagaaagcagtcagttgaaatattgaaagtattttcccaactcaggctggtttcagcggtgccgcagcgtgccrtgacrtcgagcttgctaatgaataataaagacgattgccgctggtgatgtggaaggaaaagaaccaaccttactgcagatgccctttttccttcccagcaaaaggagcttatattgagaaacccatgggaacaaagtcattcttgctagtttgtgtccaactaaagagaacatttatcttgtttaaatcagcacttagcagtggtaagtttgctcttgttttccatccataattttcaatgcaattccaattctgcataattttcaattcaattccaatttcagtgcaattccagctttgccgcaggtgtggtctcacccactgtaggactgcaggactgcaggactgagacccagacccccatttccctttccacgcactctgttccaagtcaggatgcagtgctggccccatcgcccaggaaagacttccttctgcaagtcaccactccttggccccgtcacccagtatttaaaaaccaaaaatcccgtatgaagatgttgaacagaatcctggtcagtagagtcagaaaataatcatctctcttcaaaattctcctgaaagtttcactgcagtaataatctttgtacacatggagaatgccctttacctacagtttttaaggtatttgaacatctaaccagggacatctgcacttcaaataaaaacaagcaacttttaacctttgtttgtgacttgtgtttagtagattttatgtttagtgcagttttacatttacagaaaaatagagcagacagtccagagggttcccacgtgccctgccttccactccacrccccgtctcyccattgctcccatctgtattaggatggtctgtttgtcacagttgatgagcccacattcattccatggtttacatcagggttcactcctgctgttctcttaggtggatttttgttgctataataaaattcctgagacagggtagtttataagaaaagaagtttatttagctcacagttgtggaggctgggaagtccgagggcatggcagcagctctgacaagggctttcttactgcgccatgccctggaagaagggccartgagcatgtataatgagacgacaagcatgaggggctgggctcgccttacagcagccctccctgcctgcggcagcccactcccacaagaattatcacactcctgcaagaaaccatcagtccytcttaatgacctaatcacctcttaaaggccccacctccaacactgccacaatggtaatcaaatttcagcatgagtttcagatggtataaaccatatttgagccacagcaggatggtacattctgtgggtttgggcaagtgtatgatgacacgtatccatcatcatagcrtcaaacagagtggtttccctgtcatgaaagcctctgtgctctgctggtacctctctcttcccccaactcctcattacctccaccacaacttacactgtctccatcctttgttcttttccagaacgtcttagcgttggaatcatgcagtgtgtagcctttccaggatggcttctttcacttakcaagaggcatttaaggttcctgcaagccctgtgtcatggtttgacggctcattccgttttagccctgaatgatatcctattatatggatacaccacggttgatccattcatctactgaaggacatcatggttgcttccaagtttgggcaattatgaactaagctgcaataaacatccacgtgcataattttgtatggacataagttttcaactctatttagcaaataccaaagggcatgactgctgggtcatatactaataatatattcagtttttaattttcatgaagtcctrcctatcagttgtttttttcatgaactgtgcttttggtgttgtatctctaaaaagtcatcaccaaacccaaggtcacctagattttctttgtatcttctagaagttgtatagtttggcattttacatctaactttgcattaatttctgtggagggtatagggttgatgtctggattcactttttgcatgtgagtatcccattggtccagcaccatctgctgaaaagctggtcccttccccattgagttcccttgctgctttgccaaggattgggcagctctgtttgtgcrgctgactcttaacttttggcttataaaatgtattgataaaacacaagtggtttgggaagtctcaaacatytcagcatttgtcctcgctggctagaacttcrtgttcaaaagaagaagcaggcaggacgttcagacaacatggggggccttggtgtaggctcagagcctttgctgtatcctcagacccaccaatggattgccaagcgtgtccttgtaaactgtgractgcgcttggtgctggcgctcctgggaggtgctgacttgagaatcttttattcctcaaagttttgagagaactttccagtcacacttagggccttgtgcttttctggaaggaagtttctttgaaaaacgttttgtattttcatattcatctattaatatttctttcttcattcttagccaggttagtaatttttattttctttgttcatagttcaatttcttggagttccaaattcttagacagcgatgcgttgcttaatgacgaggctgccttcagataaatgtttcatctggcaatttcgtcgttgtgcgagcatcacagggtgcacttacaaaacctgtagatgctacagcctcctacacacccaggttgtatgggacagcgctgctaggctacaaacctgcacaacatgttactatactaatactgtaggcaggtgtaacacagcrgtaggcatttgtgtatcatttgcacatagaaaaggtaatgctttgcactgtggctttacgatggctgtgacgtcgcaaggtgacaggaatttgtcagctccgtcatactcttatgggaccaccacttgtgggtgtaygtggttcatcactgaccaaaacgttagtacgtggtgcatgactataaatagatatataaatggtcttaagggcttataagtcttaaatttccactgcatctgtgattatgtgtcctcctaattattaatttttgataattttagaatttgaggtgttttacttttcttgattacctctaagagtttatgattttttcccctaaaatcaagctcttgggtttattcaccaatcctgtattcccttttatagtttaatttatatttttattacttaatttcttccctcaagttttttgttacctatttactttgacgtcataaatggagtgcctactttgtttactgtccttctctcttatcatcatggaagctctcagtattcgaaacccacctccggggaatcatttcggyayctcccacagcctttattattctctaactattttgtaatttagtttccatttccttcttaacctaagaattattgaaaataatatttttaatacccaaatgatgagagagttttgttttctgtgtttattaatttctaatttattagattttgcttagagaatgcaacatttatgatttttatgatttaaaaaacatgaagtccttttttgaggcttaatatctgatcrgttccattctggtttctagaccatagagcttgatcagtcgctattgaattctctttgtcatgttctcgggcccgctgtaggrcccttgtgggagctagggagacttgtttctaataaggctctgtgttttactagccctgtgactttaggtaagttgcttaaccccctggaaaactcagtcctctttatcaataagatgggggcatttaaagtccgcacctcaggtggctgttgtgggggttagtgccgggtgcagttaaagtgccaagcgcagccccggaacgtggctggtggaggatggccgccgtcaggcccttccgtccctcaggctgcgagtggcatctctttgtactgtgatcacttcttccttattaatttckatgtttatttcttggcacacaccagttcattaaccctatatcgttgtctggaattttataatctaatctaacattagtctatttattccactttaatcaataacttttaaacaaattgcacattttcttgrtgtcgacgccatgacgccttctctccttccattcgtatgtctgatagattttcccggccgcgtcagtttgtaatctttctggacggcgttgttttcgatatgttgcttgtagataatgagtagtttgatgcgagtgaaggcacctgtcctaggaagatgacttcccckgctcccacgcgtcgtcctcactgtgtgtgtttctcgttaatcacaccggcccacgccttccagctcctcagcttccctcctgttccttcgatggtttacctgttgccatgtggatgatgttatagtttggttttatgttgttcccaggtaatttgttttaagttcttcacacttttcaaaagcagtaaggatcttcagatttctcattatcaacttcaagaacaatactaatttccttgtcttagaagaacacttcaggatacctcatttctcccacattttataaacggggaggtgaaggcctggttcagctttacatttaccatttcagaaggcacgtctttaccagcatccgtgctaatgtctgaagaaaaggacaaactaagaaaacgcagaacctaaggctatttgyggcagtgcgtccaggaagaatcttttaggggtaggtttgagggctgtgactgaaaattctcagaaaatgtgtagatgggggaatgtggccatttattcagatgccttttaatacaaaaaaatcttagtcaaatttcactgaaatttgcgttgggaaagccaattacatcgtgaaatgggtggaaaatcttattatcccagccccagccccagctcggcctgctgactctgatgtctagagatgaacaataaggagacaatttccatttttcctcgtcgccacgcaggacctggggccgtcccttccttgtcacttttattgaacatagcagtttgtccaggaccacgcgttgaaaattgctgaagataaacattgtattttaaattactccaggcaaccaggcagactgaaaaaaaatcatttgaacaattgaaaactgaaatgttgatatcagatattaaattaatgtaagtgagattgaaacaatatctaattaaaataatttgaaaaatgacttggaaattggagctgacattagcttttcccagcctgccgctattattactgcgcagccatgctccctttccaccgaagccccgccccccggcagaatccacaggagacccgcagatgagagtctcatttatttaccctgttatggctggaaaacaagggctgaagaacctttcttggaaccctgaggagtggagtttgacaaattgacctttcagtttccaaggagaaaatgcctttcaaatgctccacgccaatgtgcacttctgcgttgcaggctggagtgtgttcagtgccttcgcttcatacaggacattttaaaatgagagagagcggtttgcaacagcaaagaaggggaaccagaagctccccagctgcggcagcctgtcctggagtggccggggtgcgtggccagcccctgccgtggtggggaccttcagccagggaggaggacgtgtgttggacgtgtcctggagtggccggggtgcatggccagcccctgccatggtggggaccttcagctggggagggggacgtgtattggacgtgtcccggagtggccggggtgcgtggccagcccctgccatggtggggaccttcagctggggagggggacgtgtgttggacgtgtcccggagtggccggggtgcgtggccagcccctgccatggtggggaccttcagctggggagggrgatgtgtgttggacgtgtcctggagtggccggggtgcgtggccagcccctgccatggtggggaccttcagctggggagggggacgtgtgttggacgtgtcccggagtggccggggtgcgtggccagcccctgccatggtggggaccttcagccggggaggggacgtgcactggcctgggggctcctaagcatctcctcgaggccacgcttatgacatcagaagcagtgcttgtggtgcaggtggctggagcaaggagctgcgtgctctgcagtgaagcaccaggcacctcttagaccacacacaggacaggcaaatgatgcgtcttggtgcttctcgaactcacctgctcccagaactgtcctcacactgtcttatggattacaggtaattagaggagagcagtttgttgtgttaaaacatgcaccccttcacagtccatgaggagccacctcaagctcgagagacctggctctccttcccagagcccccattttgaactgagtagccctgggccaacacctcccagaggctccagccgcccatctgggaccataaccaccaggccctgcacaggagcctgggaccatttggggtgagaccctctgacccagcactgctgccaggagggttagagatgaagaacctggggaaagcgtggactggggccgaggagagaccagcgtccacacgcagcaccacacaaagaaaaggtgtcgttgccatttctagttcacagtcccagcaagagtcacggcagattccataaaacactgaataattagcaattttatatacacatctgtgtttagttatatttagcataatataaaatcattagattatttcatatttagcctcccctgaggttttgcccaaacctgaattaaaatgagttttacttcataagcacaaagcagctggggcggggcagagatttcttaggagatgtgggagttcccatttctgctggtacgctggaagaaacaaatattgggactcaccctcattccaaaaacaaaactacgagaatatgaggacatagagataattttaacacatcagacatctggcaataattaaattattggagatcccaagccaagtgagagcaggaacccggggacatcagtggatgactgatgttggcctttattctgagaatcttctccacaccgggtaaacctgaacttcagcattcatgatcttgtggtctatagagggcaggaggcactaggaaatcctgatatggtaaggctaatagaagacatgccacatggagctgggacccccaagaaccatgactgcagggtaayggtgaccgatgatagagtgtcttctcagctctccattgggctggaggatggtaaactgcttgcgttcagcgctgttcctggatgtgtgtgtgtgtggcggggaaggcgggggtgggggggtggcattttcccttaggacattaaccacagccaagcttcacagggatgtacaatcccactgcatgctgcctggacagccacaacatctcaagcagggaattcagcttcaaacgctcccaggtgcacgggcctccagatgcctggcagagggaaaggcagatcctctctggaggaatcctttctttccccttctactcataaagaatacctgcaagtaaaattccaagaaatttgagtccacaataaaaaattktaaaacataccaggtaacaggacaaaagttaattgaaagaatggacaacaaaagaaagcctcagatattgtaactattggacatagatcataaatttaaatattttaatatgattaaaggaacataggaggaagctaaatataacctacagatcaatagtcttaaaagagaccacaatttttgaagaaatatattttaatgaaagatataataatagaaattctaaactaagggtatgagtttaatagcagattagatatagttgaagagagaattagagaagtaaagtatagaactaagaaattttctaaaacgcagcccacagagacaaataaattgaaaatatgaaagtaagggtaggagccatagagggcagagtaggagaatcttacctacaatgcataagtcttgcagtagagtaggaggatcttaaatgcagttcataagcattttagcagattaggcaactcttacacacgattcataagtgttccagcagagtagaagactcttacacacggttcataagcattccagaagcctatggagttcctaaggaaatactaatttaaaaaaaaaaaaggtagctacattgagagccaactttattgggaaagccattgccggggaagaggcacactctatcaccatcgaggatcatcttacacatcttacacatgatccatgagtgttccagcagagttagaatattacctacgattcataagtattctggcagagttggaatcttacatatggttcataagcattccagcagagcactccagaagtaatatttgaagatacagtggcagaaaaatttccaccactgatgtaagacaccagtactcagattccagaagcctatggagtgaaaaaggctctacacctcgattcctgacagtgaagttggagaatctcaaagacagagaatctctctgtttgtttaaaaagcaaaattttttgtctttttaaaaaaagcttacaaaattgagaaacctcctttgtcataagtgattttaaaaaagagaggagggaatcataaacaatattgagaattaaaattggaatgctaatatagatgctttggcatataaaagaataacaagggktcatcatgaacaatttatggccatatatttsaaatgttagataacatgaccaaaataccagaatgaaaaactccaatagccctgtagccaaggaagaacttgagttaatagttaaaagtcttcccacaaagaaaatatcaggcccacatattttataagcaagttattccatacatccaaacacatgcactcatacacaaaacatcccagactacacagctcatgaggttagcataaacttgataccaaaactcagtaattacagtacagggaatgacaattagagagaaatttcctcaaaaacataggtgtaaaagccaaataatagcaaattaaaatccagcaatttatttttaaaaaatgtcatgagcaattaaagctgtaattaatgtagtctatcacattaatgaaaagagaaaaaaattattatctcaatagatacaggtaaaaacatttgctaaatattaacattcattcataataaaaatgttgaataaagtaagactagtttgttcttattttgattttttaaagaccctacagaaacatcatgcttcccagcaaaacactggaaatattctcttgaacaccagaaataagacagggatgtgggctctcacccttacaagcatttgtaggaggatccgttcagcaggcagtgaagcaggaaggagagataaagggtgcacttaggagagaaggagcaagcctgtcattattcacagacggcctcattatttactcagaagagacagaagaagatccaggtaaactaatggaattagatagtttaggaagggtgctgtatatgaaatcatgcaaaagtcagctgtatttgtatatttaggaaaaaaagttagaaaatgctgtttaaaaatgatactcatttaaaatagcatcaaaatttaaagtcccgggaatatatacatatgttaaatatataagacttttatggggaaaaatataaaacttaaaagatgttgaagacaataaatggagagatttacatgttcacagattgggaataatgatgctattaataacaatcaaacttctagattcaataaaattttaacaaaaatccaaaaactattcatttacaaacgtgacaagctgattccaaaatgtataagtacaaagagccaacacctgccttcgtgtgtagacagcataaactacttacactaaagtaagaaagatcacatggatctgtgcacggagagacacctgggccaggaacagagggaacccaggagtagacccttaaatagaactgattgataacagggttgacattacagatcagtgggaaggatggcctttacaagaaactttgatggggaaatggggtattcaatgagaaaaaaatgaaatgacctctaccttgaatcacatacaaaaatcagttcttcaatatcagacttacatgtgaaggacaaaaatcttttaggaaaaaaacagagttgtatctttatatagatatctttatatagatatctttagatcttgagctaaaggagaattttttaaacaagatgccagaaatgcaaaccttaaagaaaatgataaattagactgtattaaaaccaggaactttaagaagccaagccacaaactgagatatgatagttgcagcccacataactgacaaagttttggtatccagaatgtttgaagaacttctacaaagcagtaagaaaaagacaaataacccagtagaaaaatgggcaaaacaaaaatttcatgtaagaggaagcatgaatgatgaataaacatacacgaagatgcacaaactgatgaattatcaaagacatgcacattggaagcccaaggagatacaacgtaaatctaccaaatcggcaaagtgtttaaagcttaaaccaatgagcacacggagcactaggaactctgtgtgttggtgacaggagtgtaaattgatagaatccctttgggacatctatgtcttagtgattgtactggagaaaattctctacatgggcctggagacacgtgtgagaaggttcatggctatactgtttcagatatggagggaaaaataagaacccagtttcccaccggactgggtaagtgattggaaaaataaagcgtgatgctccatgtgtatagaatgcagtcacacagcaatgaaaatgcatgagccaccatgacatgcaaaaccgaatctgagtctcagaacacagggttagcagaagacggaaggcacatcacagaacgtgtatgttattatgtcatcttatgcagtattttgtttagggatacacacataggtgaaaaaaaaagtctacatacagaaactatgcacccagaattcatgaaagttattagctttgataggaccgagaagagctcacagagagtatcaaagataattttaatgttttatctcttttcagagtgtcaggtatcctggatgtttgctgtcttattattctttggaaccaacacatattttataatattctttggtatcttcctaatatttaatggaatataaatataaaatattaatatttttgaattacaaattaaccccaaaacttctaactttcaagagaaagtcatctgagttggtgagaggaatcatttccaggagcccgtgatatatacatgtttaataaaacactgaacgttatacacatgtcagtaggtgcacatctagtttatctccctaaacgtctttgctatttctatactaagcaggatgggaccctggctgttcaggtagaaatgagcgtctttgcatcgtggtaaatctctaagggggcatcttttcatcctggagatcaccgcattgcaagcccagtcaccatgcagacgtttctccatggggtgggtcttgtgggcacagcatcttgcctcctctcttccttcgggtggtcaggcatcagcccccgttcacgatagcacggagaccgatcttcatggatagcctcttcttggcttgctgtgccacagtgcctttggcctcaccgccaaagaagaaaagagagatgatgaacagcccacttccagcacaggcacaggcaagggcaccccccttctcttctccctctctgggaattaagctttaaatggcatctctggttttagtaaataattgtcaggaaagcagttatgttccagggttattttaattccttctgacagttagcaaaattaaacatccaaacattggggcaacatgctactttcagatgacttgatgtaaaatgattaacatcaaaacattttcttgtgttttgtgttgttgccgcgcagtggatcacaacacgttacaggaacgtgctctgtctgctgggctgatcgcaggggcgcacgcgcgctcgcacacacacacacacacacgtgccctgccgcatggcatctttctggctgtgttttgacacagtcagctgtgcatgggtttgctttgcatacaaacgatcaggttacaccacaccatgtgggaaagaggaagcgtccgccagctgtgcagaacggtgtacgtgtgtgattctgcgcccgttcctacggcgtacgtgcgtgatcctggacccgttcccacggcgtacatgcgtgatcctggacccgtccccacggcgtacgtgcgtgatccggcgtacgtgcctgatcctggacccgttcccacggcgtacgtgcgtgatcctggacccgtccccacggcgtacgtgcgtgatccggcgtacgtgcctgatcctggacccgttcccacggcgtacgtgcgtgatcctggacccgtccccacggcgtacgtgcgtgatccggcgtacgtgcgtggtcctgcacccgttcccacggtgtacgtgcgtgatcctgcgcccgttcccacggtgtacgtgcgtgatcctgcacgcattcccacggcgtacatgcgtgatcctgcacccgtgctcatggctggcagccggtattggaagagaatcatgagactgcaaatcaggaatcctcagatatccttttatcgttggctctttagttcaaaactagaactgtgggtgtggaaggtataggaaactccctccctgcaccactagtgagtgccaccactggtcttagtaatagaggtaacagtggtggcatgatcatcctagagatagtaatgctttaacgctgccactagggagttaatttgctcatgcttcctataagtcacttattcattccctcaacagataatcgttgaggtcctctaatgtgctggacagtgttctaagcactagggcaaatcctcgctttgtggaactgatattctagagaaaaaatagataataaccaagcatgcatcatgtcagagggtgataaatgttttgggaaagaatgaagctggatgagggcacagacaggtgatgggatgagggcccgatgttgggtgagaacaggaggaccatgcagatggctgcaggcaggcatttgagggtcaggaacaaacagcaggtacaaaggccctgaggcaggagctggccggggcgtcccgcgctgaaggggctgagcaggggcgagggggctgttggaggtgatgtcagggcagcagccaagggccaggttctgaagggccttgtgtctgtggcctggactgtagacctcactgtgggtgagatgcgccagcgcagggctttgaggagaggcttgagtgtgtgttgagtggccagcatcctcccccccccagtgtatagagtcagcccctgtccagctgtcgaggggcccaaggccagagggcaagtggcattccatgctgggcttctggacatttaaaagtctatgtgaagctcattagccgctaaaaaaatgcttcatactttgaaaaatatatgttcatagtgaaaaaaattattcaaatgtgcataaagctattgtttttatttctgaaaattaatccaatgaaaaagacagtggattggattataatcctgtgagtagtgatgttctctcgatgggctggtaaggtttggctgagtaataaattaatgacatacataattttgtaaattattgtatatttatttgtaaatgcattttattccccttgtttcatgaagtcactaattagattgtttaatgacgatcttcataaagttggggtgttttagacagaaatgattcaactgtaattgcacacagggtacaagatgtagaagtattttcattaaaaataaaaatgcacttaaaattgtaaactaaaactatgcttcaaaagctatttttcttcaaaaagatttaatgtgaattattaaaattctaaagccaaatataattcacaaaatatcaaaattttcaatcaaaagtatttaaatagagctgtattttaaattgtattttgtgacaatttaatcaaattgtagtccatatttttgtaagaataagacatttgcaattctggctctgagatccctgcagttgctgatgtcatgagctggttgcgtgagtcatgcatgtcctgtctcgacagacgtggaaaagtgaaagggattgtggggtgctgcggggcgcctccacatttgtccgtgagtacttctagagctgtgagccgacgtgcaaagaaacgcaagagtgggcacctggcactgccaggaacggatacttctttatgcagaaatcattggcttttctgtaacctgaacagcaggatttgacacgttcattaatttgtcttttctcctgcctaagtgcttctgctcttcaaacctccctctcccaggcatgaaaggcctcacgcaacacgtggcttccacagaatgcaggctgcaggggtggaggccctttcaaggctcgcatggcagaagtgctgggcgcaggggacatcatgctgcggctcggcctgtgcagcccctcccaggccgggcccggcaccatggatggaagagccaggcagcgcagttggggtctctgcaagatccagagcagagaatgagatgctggacgcacctggccacgcggagacgccggccggtcccatgtgcaccctgaggccagaacctgcagcctcaccaggcgcgctgtgctgtgtccgaggagaataaaggcggctctgcggctgtgggcctgagctcctggcaggctggggtcacgggggacagacaggcttggggaagtcggtgaggtcaggaatttgggtggagacaccattggacgtcctagtggaagtggcaagaagacaggtgggatatcagatccacagaaaggatggggctggaggaaagaaaatggctctgatcagtgaacagatgccagtcagggcctgaggactgaacacagcacatgggggcagaagagggtggaaaagagaagcctgaggcccagcccgggacaccccacacgcagcggacagggagatactgccacccaggacaccccacacgcaagggacagggagatactgccacccccaggacaccccacacgcaggggacagggagatactgccacccccaggacaccccacatgcaggggacagggagatactgccacccgggacacctcacacacaggagacagggagatactgccacccaggacaccccacacgcaagggacagggagatactgccacccaggacaccccacacgcaggggacagggagatactgccacccgggacaccccacacgcagaggacaaggagatactgccacccgggacaccccacatgcaggggacagggagatactgccacccgggacaccccacacgcaggggacagggagacaccaccgcccgggacaccccacacacgggacaaggagatactgccacgcaggacacaccacacacaggggtaaatgttcccgtggtgcccagctggccagtggccgcacagagctgtggcctggtcctctccgagcccacgttctcaccytcgggccacactgctcggtcacggggtaccccagatgccaccacacccaccttgaaggtggttttatgcttcatcttcccgcccccttggctgtccaaagtgtgacatcagcacagatctgagcataaaacactggtgacagcttccatggctgcttccaaacctttccaacaggtgtcagggtgtcaggatctcgggatctcaggatttgctgagtgagagtctttggttctgaaatgaagactgaagtgtcactgcacgtgtttgatgttaagacatgttagaggtcccagaaccaaagaagcttagagcagggccttctccaggaagcttcagaccctggcgagcccccagtctagaggggctcaggacacgtgggtccttcctaccctgcccctccctaaggtctccctcagcccctagcccatcctccacaccgcccgtggtcctgggagaacagcgtgtgccccagcgcccagagggtgagtgaaaggctcacagtgcacagtagtgagtgagaagctttaagaaggtttgcaatgtttaaaccttttttttttaggagttttaggtttggcctgagtgactggcaggctatttcttaaccttgtatgaataaagaccccattttttcatagaatacctattaccactgggagagcccagtccgggattgtccactccgagggaaggtggggcccctcatgggcctcacgtatggccctgctagagttcttttcagaaaacgacatggggaaagagaatgggctgaaataggaaagtatggacattgctaatttttaaaagattcctttacaggaattgtgatcagccctgcgaccaggtgggcctcatgttagtcggcgacacggcagctcgcctgggcccaggaggcctctgcactcccagtggctctgtggccaccctgggatgcccaaaaaggaaaggaggtgccggttgggaccagagctccaatcactgaatcaacttccttcaaagctctttccccttcctcttcccaggaatgacttccgctttaaggaaagccctcggctgggcaccttgctgacatgcacggggaatcctgaccagtggcttccagtttcaggaaggctgacctcagggcaggggcagagtccacagaggtccccaaattacccggagatgctgaccccctgcacgggggccctgggtggaaagtggcagcgttgaggcagcttgtttacggtggctgtgaggcacaggatgcaggtcttaccctaggggacgtcgtttcagctcggccagaaaccaggctccaccccataagggaggaggatccttcctaaggaagccagtggtgccgtccagaaagctggccaggctccaggtgacagcttcaccccgggcctgggtgctctccctcccctcccaccttctaatggagcaaagccattaagtgatccccattgtaatttagattacagaagagacttctgcacattctttcaggttaaaataacgaggataaagagagtaggcaaaattattccactgtagctgcctgcttaattatatggaatgctgcataaattgtcaagtgcaaagaattagtctgataaattaaaatactaattaaataggctattgcagaattttgagaacattatagggttccgcttcttcaggtaatttgcatatccttcatctagtgaatttaattttaaaggacttcttttttgtgtttggaaaccctttttgtctcccatgaagataaaaacgggctttctctgttattctgtgcctttattaaggcagcttctccaactgtctccacgccctggcctgacagacttgggaggcccagagcttggctcaaaacataactcagacctggcatttgatggacatctggctgaagcaggctttttcttcttttcctccttcaayatgttcagcagagacttaaaaattggcagtattgtcatggagttcataaaaaggaacaaaaggacactgagaatcagcaggtatttactttagacttaaaaggagtaggtgtgagtcctcagttacacaggtgtgggcaaaagtcccgcgagaggacggcgggctccccagtgcagacgtgtcaggatcagagctcagcacctgtcacaattccaccaacagtgtggaaaagggaatccacgcggccatttagagaaatccggcggagcatcaagggtgcaggaataatgtcgggaggtgtcgggggtgccctgagacccacaggatgccggggaccacgaggcattgtttttccttttaggcatatttgaggttaaaaaaaaatctgaagcaacaaaccgcagggctgtgctgcggaggctgcccttgtgccctggaggctgcccttgtgcagcgttcgcgatgcaggaggagggaggtgcgggcctctctgtgtttcgattctctctgccagtgagaaatctcaaagccagaaagtgaactagcaaggacaggcatcgctgaaagcggccggaacacagggccgcgtgaagtcagctgacgccccacagacactggctcgttccacagcgccaagggaacgcgtagacgcccccgaaaagcactcagcaatctccaaagagatttccctggcaagaagctggactctggggactccgggacccggattctgtgctttgtgagactccccggcacctgctcagggcactgtcgggctttccagaggatggtggagtttcttgacgtgagctggcaggttggatgtcagtgcccagcacagtgctggagggcatcactcagcagaccctgtgcagggccacgggaggggagcagtgacaccgggagcatatgggctctgagaagcggcctgcggagcccctgactcctcctgtgaaggaaccggcctgtgggggaaggaagagaccctatcttgggaaacaagaaatcaggagaatcctggtgacctttatcctattgctgtgggtgctgttagtggggcacacagcaattccactgtgggaggaagaccttgatagctgagtcacccagagcaaagtcgttgagcgatgcttcagctgatgtttgatgttcaaaacacaagcagaagcactgatcggcgagttaatagcataagagaccagagcacactggagtctcagacacgcagcagatacagcactttctccttaggaagtgacagtggcccggccatgagacatgcagcaaaacagccgctgtcacgagggcacatggattagtcgcttgctgtgtgctgagacctgggccatgctggctcagaggctcccacgtggtcctcacagctgcttgtgaagcgtgcatggaaatccacagcctggatggggagacggattgaagtgtgggaagcgcttgcgccggcacttggtgtgtggcaggaatgtagccactgccagcttcattacttttcaattattttactctgtgacttcgattttgacttacactgcagtctcagattagctcgagaatgaaactgtcccttgtactctcttaaaaccttttagtayaaaaaaaaaaaaggaaaaagaaaaaaccaaacactaattcaggttgtttgcttcaatcgctgatttaaaccgactgaactacattttaaaaggtccagtcagtttcgagaggcagcaccgtggggcatgtgggagggttgtcggtggcacatctgttcacttatccgtatttttaattttcagcttttattttagaatctgggagtacatgtgcaggcttgtgacctgggtatactggtggtgctgaggtttggggtacacttgtgacctgggcatactggtgatgctgaggtttggggtaccgtcttgcttgctcccgtcttgcaggtagtgagcacgtcccccagagggagtttcagcccttttctcccacctccctctcacattccctctcacattccctcttacrtgtctgttgttcccatctctatggctgtaagtacccgatgtctggtccccacttccatgtgagcgcatgtggttctctgatgagtgtagttcccacttccgtgcgagagtgtgtggcagcgtgtggctctctgatgatgtctggttcctgcttccgtgtgagagtgtgtggcagcgtgtggctttctgcttttgcgttaatttgcttaggatggtggccccaaattgtgtcctttgcagcaacgtggatgtatttgttgaagaaagaacacaggcccctaagcatcaaagtgcagtcatagaccctgaagaaccttgcctgtcctggagaggctcacaatcagcttgggaggcagctctgctaggagctcaccacgatgcctgtttcactgacttggaagccatttctcagctcaggtccactgaagagcagagacggtgccgttgaaccacagcacgtgctttggaatcacctcagatgatcttgtatttattgaacaaactctctcagactcgtttatcagcctcactctcgcatcggcatctaaaaggagttttagtgatcaatgggttaaagaatcctgacgcgcgtcacactcggaacccctccactgagtgcctccacagcacaatgctggtccccacgtgctcttgaggccacggtgaggttgatttccacgtactctccagaccaccgcggggctggtccccacgtgctctccaggccaccacggggctggtccccacgtgctcttgaggccacggtgaggttgatttccacgtactctccaggccaccgcggggctggtccccacgtgctctccaggccaccgcggggctggtccccacgtgctcttgaggccacggtgaggttgatttccacgtactctccaggccaccgcggggctggtccccacgtgctctccaggccactgcagggttggcggcaccacacttctcatgagtgttccactgcagccaacaagatcatcctctgagtcactattggccgcagctgacgccctttccggaagttctgctgcagcgcgttcctggcctcacaggaggcccggtggaaagtgcttaagtacaaacaaggactcattccctccccaaggcctccaaggatgcaccttgctgcactgccaattcagggtggcgggagttgcctagtcactaccgtgctggcccgtgctgcgaccccacttcagctgggggaagtgtgcactccagaaccaaggaaacacggacaggaaggtcccacttcagaaccaaggaaacacggacgggaaggccccgcctcaggacccaggaaacacggacgggaaggccccgcctcaggacccaggaaacacggacgggaaggccccgcctcaggacccaggaaacacggacgggaaggtcccacttcagaaccaaggaaacacggacggggaggccccgcctcaggacccaggaaacacggacgggaaggccccgcctcaggacccaggaaacacggacgggaaggccccacctcaggacccaggaaacacggacgggaaggccccacttcgggtgtaaacaaagcactgtgccagcacaggggacagtttgcatccactcagtagaactaattttactttctcaggaattttgtgagcccattattcagtacagccattgtgaaacattgaatgataaaaacatgcacttaaataaactatgttaagagcagaggcgatccatactaaagctcaccattttataactggttttctacattttactgtcatcggcacccttgagattatttctgtcctccacgtctgcatggtgggaactcttccccgcacgcctgcaactctgtatctggttggttcggccccgccatgcctcatgttgaaattcggtccccatgtgtgactctgcatctggttggttcggccccgccatgcctcatgttgaaatttggtccccatgttggaggtgcagcctggtgggagggctttggatstgggggagggacagatggggcggggcagatccctcgtgaatggattcatgccctcccagggtggaggtgagcgacttctcgctctcttaactcctgtgagagctgattgttaacaagagcctggccctccctccgccctctcctgcttcctctctccccatgtgagctctgcacactgcatggctcccttcaccttccactgcaagtggaagcagcctggggcatcctcagatgcagacacctgtgccatgcttcttgtgcagcctgcaggactgtgagccaaataaacctcttttccttgtaaattgcccagctttgggtgttcctttacagcaacacaaatggactaagacagtatctctccccattccctttagtagtgtcacatgagcactaaagtcaactgtgatgggagcatttacacagagcagaaattacccagtgccataatttacaattctgttatgcaggggacaggcagcctgcacaccatgaactgtgagacacagagggccgtgctgaggatgttgagggagggggtgcccctgagcacatgtagggcctgagctkcctgggaggaggactgcgttttcgtcagactgaggagctcagagcatcctggcaggggacggagaatgcctgaaatgtgctgaaaagcccaatatctgggcaaggagtgccacctggacctcagggccagcaaggcaagttctccatgcctgcaggggacaccattgaaaggctttgaagggccaccgaagtgtctggatttggagccagaggtctggatgttgaggtcaaggatggacagacacccttagactcactgctcgtgacaccctgggcacagtgtggagaatggactagagccagacaacctcttggcaaccacagtctgcaggtcaagtcaggcccactgtctgctgttgtaaataaaggtttgttggaacacagccatgaccatccacttaggcgtggtctgcagctacctccacgctgcaaggcagggctgagtagctgcgacagagccgtgggcctgccgagcctgacccagttgttacctgcccttcacaggaaaagggcgctccccggcagattggatttttctcattactatgggctggggctgccgttttcattcctgaccctgacgtcggtgaccgttctgcagcagtgaccagggtggttctaaggttgcatttgtactcactttctgttcctcagcctgcttaaaagagtccactattaccctcctgagagaagcttgccaatctgtcagatgtctcctctgtttgcgggaggacagcagcaccgatggccttatagctctcttgccacccaaggcttacatttgtgtcctcccctcccctggggctctaccccatcataaagtattaaaggagttttgctttagcccagactgttttctgtctgtcttgttctttcagcgcagtaggtaattagttatatgtagaaaatagtatgcatttgctcaaagggaaaaactttccataagacaatggagaggccccaacagcagggagggcaggctgtaacaagatctcatcgcgtccctctccgaaaggaataatttcattaccccagattaacacaggggcgttacaataaggggtgagagtaatygatattttcctgctatctcatcctgtattaatcacaattgcaaggcactcttcattcatagggtttgcagtgaaattccatttttttctggttttcatctccaaagtgacaagggctttatgcaaacgcatatttccacagagtcgtaagccaaggtcaattgccttgtgacacccgtcctctctgtgaagtggggcaggtgggtttgctgtgttggtgctaggattactggggtttcatttccatctgctaattgtttccagagctcatttcccttggtttgccatcgagtgcaattcattctctgaaagtcttcctcattctacatcaggagaaaaccagggtgaggcttttattggagcgaaattattataggatgttcctgtcagggcatgaacaagaggctgcaaaatagctggcggtgctgatggcagaaatacacacattcagctttgccttctacggagtcttttatcaacacctaatgctggttaatgaaacatatttcccagtaattatacagctagaaacgattacgtaattttaaaataagacgttgcagtttgcagaatgtstctacatatttctcatcagtgattcatagcagtcctggggacccgggtgggacacccctttctagatgaaaccaaaagcgcacagttgtgccggcccgaggtggacgcacactgggtcagtgggaaaatggggcctcgtgcaggttctaattctgtgcctgttcatgacccttccattaaggtaggcgggtcaagcagtcatgtaattgaaattttcaatggaggaaaatactcagaggtgcccggagactgaggacctctccaacctgactcttgtgctttctgatttttcctaacagttgacaacaaagacaaactggaggaaacctctggactgaaaattcttcaaaccggagtcgggtcggtgagtaacagaaggggtgccgtctgctctgcgatctgcagtgctgtctgggtgctggcgaacaccgtgagaacagaggctggacctgcaggttaattcagccaaggtcctgttttcctgggaggaccagtgggctgcagcaggagcatcctctgcgggtgggaaacggtggcgaaacgtgcctggcgagttcaatgatgtcttagggcctttgaagtcctgatttagtatccccacaagaaaaagcattcatggctaagaagaacggagaagccttcagaaaataggtgcttccttccttcttcagctgttttgtagttgccaagtgtgtgaaaatgaatatgggctagagggattactctttcctcctgggactcagtgggacatacttgtatcttcaatatcgaaggacgcacatttgggagaggcaatataaaacaggaaatgcttccataatatcactgaaaatctatcaagcccctgtgtgtgcaaaccttaccatgctggtatcagagaggcaatgcttccataatatcgctgaaaatctgtcaagcccctgtgtgtccaaaccttaccatgctggtatcagagaggcgctcggccagcctcctccagcagctggagccgcaggcgcctccccgcaccgcgccgatggccgctgtcccctgacatgacaacttaatgaactgcacacagagcgcggacgcgcctcctctgaggaatggcgtgtggccactcgtcagtcagtgtggaccgaagccaatctgcgctcccgcgttcgagatttcgggtttcacagcgctcgccattagagataattaactgtgaaggagcgcttatttatgagtgtgctcgctgcacagcagagccgccctctgcggagccacttaaagacaagctgcttctgtggggaaatctcgtcctcaccaggccccagactcgggctcttgaaataagaagctgcttaattggccgctcttcccaaacagaggttcttgcgcttcccatgcagagcctgcttaagaatagcctgaagggctttgaaaatggctgcgtctgggttaaatgacgggcagggtgtgggagaggagagcagccggcgactgatggaaactggcgtgcacgtcccggacaggtgctcctgttcttggtgtttctcgatgccttcctggctcgtgccggatgaatgaggtgttgggcagctggtgatgccctggtctttcccgggagcttgctgtctctttagcacccagtgaagggtgagaaagaagccaagagtctggggggctgccgagagccacctgcatcccacggaaggtgcagtgaccgatgcggaggggccaagtagttgcaaggtggagtcagccgggggtggctgtgaccgggccgtgagtctcctgcatgtggaagatgtgatgtcggaggtgcgtctcctgcatgtacaaggagctgtggtgtcctcctgtctttcctctcccttccgagctcatcacgtggggtggtggttggtgctaagtcattcctagagggataatggtgtccaggaatttgggacaaatctagatggactcaggttagagccatctctgtaacctggtcagagaacgcgtcgaggctgggaccctctgctgtactgtggaatatttaggccccgtgagaagcggctgtggtgggtggggaggtgggtcctgtggacatgagggaggctctgccctgagagggctggaggggcaagggtgggggacggggaatgggagactctggggttcatctgggaggtgacaagtgtggtgcctggtgtccagacacaccttcctcattgaaacctggactccggccactccagaaaagaggcaggacatggtgayaggtggagccactgactgggcagctccagcccaagtggcttctgccatgtgccttgccacaggttgcctcttaagcatggaaggtcagatgctgttgtctacgcacacgtgagcctgggggacagcacctccccggctgcccactcacaacggagctccttcccacgcacacgtgagcctgggggacagcacctccccggctgcccactcacaacggagctccttcccacgcacacgtgagcatgggggacagcacctccccggctgcccactcacaacggagctccttcccacgcgcacctgagcctggaggacagcacctccctggctccccactcacaacggagctccttcccacacgcacctgagcctggaggacagcacctccatggccaccctttcaggacagagctgcccttcccacgctggaggagccacagggcctggtcgctgtggcttcagcctcccagctcctcctgtcctctgctgggcacttgtaatgtccaggcactccctgcttggatcaggggatctgggtttcatcttcccagctcctcctgtcctctgctgggcacctgtgatgtccaggcactccctgcttggattgggggatctgggtttcatcttcccagctcctcctgtcctccgctgggcacctgtgatgtccaggcactccctgcttggattgggggatctgggtttcatcttcccagctcctcccrtcctcccctgggcacctgtgatgtccaggcactccctgcttggatcggggggtctgggttttgtgctatacttggtgctccctttcactcaggccccttcttgactctgcagagctacccctcgccatctctttcacgcgggcctcctgcagtctctgtgctcaccctgtgactctgcttcctgtgttgtcaaatgggggtcatcccaggacccgcaccactgggtcgtgtgcaggtttctggggtggcagagtgcggatgagtgggcacgcgtaaacattcactctcattcccatcacggtcctgacgcctccacagcatttgattaggcagggttggaccttcttgttccatccaccctgtctcagcaccctctgtcgcgccttcacctctccctccctcgatgctacaygacagattatttcctgaaattgtctcccacgttccttcctcctctgtctaatctgctgtaaaactcaaatgctgggtacttttctcttggttactgtatttttcacttagaaaaaartttttatttagtaatttatcaaatctgttattttgccttctactttgattatgtgtttgatatcttcttttatcttttcaatcattttaaacctacttattttatggtctcgtccagatcctctggcttattttatggtctcgtccagatcctctggcttattttatggtctcgttcagaccctctggcttattttattgactcgttcagaccctctggcttattttatggtctcgtccagatcctctggcttattttatggtctcgtccagatcctctggcttattttatggtctcgtccagaccctctggcttattttatggtttcgtccagatcctctggcttattttatggtctcgtccagatcctctggcttattttatggtcttgttcagaccctctggcttattttatggtctcgttcagaccctctggccgtttcctagtcttcgctttctacagctcctgctcatcacatctgctgaccccctcctgtgggggrggggtcctcttttgtggttgatgaagtctttttttagaattgtgagcttaccctcagcagggattggtgatactgaagtgtgaatttctatgtgagagtttctggataagaagttctgccctcagtgtcccagccgatccactttcctgtcaattgcccacctgggagtttctgcttcattcaataaagtgtggaccgtgctctggcacatgcacagatctggggttcagccccctccccacttccccagctggtaggtggtctgttcctgggcttcaatcttgagggaggcaggtcctcaaggtcctgggcttcatgtggagtccccatctccatccaccccaaggccacatgggctgtcctcgtgtgactataggaactcacaccccagctctcagcttccacaggaactcacaccccagctctcagcttccacaggaactcacaccccagctctcagcttccacaggaactcacaccccagctctcagcttccacaggaactcacaccccagctctcagcttccacaggaactcacaccccagctctcagcgtccacaggaactcacaccccagctctcagcktccacaggaactcacaccccagctctcagcttccacaggaactcacaccccagctctcagcttccacagraactcacaccccagctctcagcttccacaggaactcacaccccagctctcagcttccacacacttggatccacagaaagatgccaaacgtccaggagccacttcagcagcagctcccagtcacgcccggttttgattgytcctctcagttttggagtctggagatccactttcttcctgtgctctcggctttgtgcccctcagagttgatgccatgcgtcatgcgggatttcgatgtgcgtgtgcgagggtccctgctcagcctcagtttagtgagctgttcgttcattcattcctaggtatttatatgcgtcaggcaggttttaagaactgaaactacagcagtgactaaaacagacaaacccttccatcacgagctcccattccaggtgaagctggaggtgtatcgaggaataaggcccattgtttcctctgaaggcagaacccagccgtcccctgcattgctttctgctctcactgggcgcgacggccatctctgttcccttcaagtcgaccagctcctcctccgtgagttctacagattggactctccagggcctggctccctcctcctttctgccggtgctgtctcctgtggggaactcacctgggccctggctttttatgttatctgttcgatgatgatcccaagcctacgtctccagccctgacccattcaccgagcaacaggtgtgtatggccacaggtgtcctccttttctctcctgggagatctgtagaggagcctcacacttaaagtgggccacgcagggctcttgatcttcctgccgcagcctgtttctcccgtcaggttttcttatctcttaatggaaatggcatcactgctccttgtgaagctctgtctaggaagtagattgattcaatgcatggaaatctgaattgctgctcagattatctgtgaagtggactatttaactctggaaagaattggcctctgcccactcctgatgcccacccatctcatatgtgggaaggaaggttctccctagactgcgggggaccgtgggggctgagggcagaggcaggagctcacctgcacagcaccacacctctgcttccatccacatccaacctgtgtcctctctggcccctgagcgagcagaggatggaccttgccattcccaggggcagaggctccgtcatccctgggacagaaaattaccaaacgctagagtgtttatttcacccactggttacgatctggccacaaggagctcattcaccctgacctgcctgtcttcctggccttctccagacatttctttgttctcgttccaccaaatgctggagaccagctcctggagcattatccttctccacgtggccattttacatttcaaaagatggttcttctcgagctcttgaccccacggacatcgtgcccagagggccctcaagcccagcatctgtgtctcctgttgccccaagtgagtgcagaaagcaatgcaggtgacggctgggttctgccttcagaggaaacaatgggccttattcctggatgcatctccagcttcacctggaatgggagctctgtgatggaagggtttgtctgttttattcactgctgtagtttcgggaggtttatatatttggagtagatttgcagtggtgaaaatgggagaaaggggtacaagttgataaattatttaacagctaatgatttttttttctaattttaattgccttattcagtattaagcctgaatttgacgattctgatttttaatgtatttaaaattcttctaatccctgactctggaatataaagcagagtttgattacagaaatctaatagcatttactaaatctctcccctgcgcttgcgtttaatgcaagtgatgacagatagtggaattaaaaccttttaagccaaatggaaatatctcaaaacaaaatttaaaggaaatgaacagattacagtgcagatacacacccctcatagatgggtggcattttgatgtatttcaaaatctaatttctgatatcttgaaaagtatttgcattttattcaaattaataaagccatgtttttttccaaaggaaagtgataatcaccaaaaagcaaaactcaaaagtttggaagaaaaataatttggataaaggcagatccatggctccaaccttctcagttgtgtccagagttaggggtgcgttctagcttcttagcatcatgatagagcagagaggtcccctgcccagcgttctagcttctaagcrtcgtgatagacacagaggtcccctgcccagcgttctagcttctaagcgtcgtgatagacacagaggtcccctgcccagcgttctagcttctaagcgtcgtgatagacacagaggtgccctgcccagcatgtcagtgagaagtggccgaccctgagtctcagcagagcccctgcaggctcaggagcgtgaacaagaggaatctgagaagaagctgaggggaagagctgctcagactgggggctgtctgggtggcaaagagccccccatctctgctgagggagccttctctctgtccagtgtgggatgaggtcagaggtcttcagatggttattcaaggagccctgggggctccaaggcagttgggtgtgaatccctgctcagctcackctaccctcacactccggctcagcaaggtccaggcttctgttgcctgctgctcactgggcttctgggtgagactttgttccaagaaaggattctgtagccaagaatatgtggatcccaaaagtcccttaaaagtctatgaacctatggtcatgcatccaccccatgaaaaatgtgaatttgccatgatatgtgttacctgggatggggggtgggggtgtgagaatccaccccatgaataatgtgaatttgccgtgtgatgtgtgtgttacctgggatggggggtggggggctgtgggaatccgccccatgaataatgtgaatttgctgtgtgatgtttgttacctggggtggggggcggggggtgtggggatgctcagcacttgtcacagggagcaagcagtgggcagaactgagatgggtgacggatgtgttcgaaaccagcttcatttccccctgacttccaccctgtcatttcctgtctgtgcaaagaggtttgctactgtacacagctcctacccggttgcttggggattaccaagaggagcctggacattgaatgcagactttggccaaatcaatagcaggaacatatcagctgtgatggctcgacatggccatgcaccttctccctggggtcttgtcaagatgcagatttcctgcccgcctcaccagatgcctggttctgcacacccaggtgtgacccaggagaggacgggacagaggggggcctttgcccacaggtgaagagagccggagtaaggaggtggggaggtggggaggtggggaggagctgcccctgcttgtcagggtgacagctgttgttgctctgcggtgcccagcagcaggaccgtgcctttgtcaggcacattaaatgtttcaggtggatccaggtggatggatgaggctcttggctggaagaaatgctatttgggaaatgccaacagrtgaggtggagagctggcaagcagaccacttgcaaagggctctccagccaaaatgatytgtgtgagaccggaggccctgtggtgctgggggcaggtgaaatgtcagagctacagtggggtgagaaatccgtagatgttccaatcacatcctaagtctaaagtcctattattttgttgttgttgtttgagacacagtctcgctctgtcgcccaggctggagtgcagtggcgcaatctcagctcactgcaagctctgcctcccaggttcacgccattctcctgcctcagcctcccgagtagctgggactacaggcctctgccaccatgttcagctaatttttctgtatttttagtagagacggggtttcaccrtgttagccaggatggttttgatgtcctgacctcatgatccgcctgccttggcctcccaaagtgctgggattacaagcctgagccaccgtgcccagcctgaagtcttatttttaagattagtactgaaggttgcttgagaacaacagttttggttttataaataaagaccaaatgtgataaaactcatatacgtacactccatggtaggcagggtgaatgagtctaactctttagaaggcaggacagcagtggtcatctgcaaaccaacaaacaaaaactcttcccctttggctcagtaatcaaactccragaaatgtatcctaagaagacactccatcsagcaaggaaatcagaaaaacaaaaccttcaccaaaaaaaaaaaactgacttaaaatataaaactatagcaaggtaactcatcattaacaatcaaataaatcaaattctgtgatttcatttaaaattttgagaactctaaacttaaaggcagctgtgtaaacatgtgtgtgcacagagatgttagaagcccatgtacgtaacaggtgaataagagagcagctcttatggggttgatggtggcagcagaagaatgacgaggctcgtaattgggaaaggagagctttattccttataaagagctgcatcctgcaggacagccaacctgaccagctgggaagcgtagcctccggccagaagccagaaacaggcacttctagtgagaggcaaagggaacaggaatttatgctgagtgggtggctaagtatacatattcagcaggttatgggaggagccgtgaatatttgtgaaggggagacacgggcatgcatggtcagctaatgtttgcaaaatgcatcccatgttcactggggcatggagacttaacatgtaaacagattacagttaggcattctgcatcaaaaggtgaagctgaggacatgaaggccctccctgtgcagcctccacagactagccagaggcactccgtgaatggggtctcttatgaggagggaatgctgattggttgttgggtcgaaaccataaaaggaagagcagtttcaggcacttggtggatatcaggaatggagtcttttaaaagggctggtttctgttcagccctcagagaaggaagcctggtggtgattagttgagaggggggyggtaaccaggcgggtctgaacccagggaaggaagcctggtgatgattaatgatgggggcgggtaaccaggcgggtctgaccttcatcctgtcacggtcccaactcagttttaaggtttctctggggtcctcttggtcaagagtaggtcattccgtcagttggggcttyggactttatttytctcagtggaattgcaagtgagttttttcctttgtccaaaagtttttatatkatttctgacttcttattttgaaaccattatagattcacagggaattgcaaagttataacaaagaagtctcatgtatcccttacccagtgaggttttcccctggtggttacgtctgggtaattataaaagccaattatggcaaaaccaggagattgatattggaacaatgtgtgtgtctagttctatctcattttacctttagtaccattttttacaacctaaataaagagaaaatatgtaaccaaaggaaaggcrtttacacacacattagcaaatgtggggacctgaggggagcagccaccatctgggacatggcggcccccgtcacccattgaccgtggttgctgtgggaaacgctcacagtaacgaaagtcatcagacatccgtgaagattctgcgtggcatggtgctgcgcataggccagtacatgacaaaggtttaaaatcactgctggcctttagatgagggcctgtgtttggggattcaagagaaggggcattggatgttggggggtgggggggcgcaggatgggctggtggggcagagagcacggccacacgttcctgayggggcccctggagcaggagcttggaggagcagctcccaggaggaagagaagctcacgtggtcagaggtaggtttgtcagaatggagcgaaagcggtgggttcagcagtatctgaaggaagagatcacagctcctgaggctctggacagtggatctaaaaagcctgaggtgtcagagttcacrgggttccttgggtaaggtgactgagctgagcttgcgaaggtaacagtgcgtttgatggtaatgctgggtcacaccaaggatagaagcctggggggaccactgaaccctacatctcatgctacggcttgtccctagtgccggctcagcctaaagaaccaggctgcagtgactggggtgtaacactccagcaatctcagaccgtccgtgagcccaagaaaaaccagggtctctctctccagaaacattcactcacacccccccaagacagcgtgcgtttcagggagcctgtggcatctcaccccagaagcccaagagcacgtgggaagctctgccaagggtgggaggcagggggcggtggtgcctgtgtgggctcttgcccactcagtgcatgtggtgggctctggcagtactggggggagtgggtatggtggagagcaggtactggggggagcaaatactgggtggagcaggtattggggaagcgggtactgggtgaagcgggtactgggggagtgggtacttggggaagcgagtactgggggagcaggtactgggggagcgggcactgggggagtgggtatggtggggagtgggtactggggggagtaggtaatggagcagttactgggggagcgggtactgggggaagtgggtactgggggagtgggtactggggagtgggtatgggggttgggtactgggggaagcatgtactgggagagtgggtaatggagtgggcactgggggaccatgtactgggagcaggtactgggggagcgggtactgggggaagcgggtactggggggagtgggtactgacgagtgggtactggcagcagcaggtaatggggggagcgggtactggaggaagtgggtactgggggagtgggtactgggggaagtgggtactggggggagtgggcatcttttgtcatttcctgcactgtcactctattttattctaatatgcattagttgacagatggttttctcctaaatgcaaaagtgcctcagtcctaagaaaagcctgtttactggtaaatattcctaatttgcgtctgaaagggaaatctgcatgaaattgcattaaaatatttgcatcagcccagcccaggcagctctgcattcagcccatctgaggaccccagataagcctttggttggtgggaggtcagaggtcaggagcagccccttctctggtttggctctgtggtgaggacctcaaatgccccaggacaggcctgtcatgggtgggctcagctgatgaggacttcgatggccccaggacaggcccgctgtgggcttggctgtgtgacaaggacctcraaggccccaggacaggcccgtcatgggtgggctcagctgacgaggacctcgatggccccaggactggcccactgtgggtttggatctgtgacaaggacctcgatggcccagacagscccaccgtggtgggcttggctctgtgrygargacctcgatggccccaggatagacccdctgtgggtttgtctctgtgacaaggacttcagtggccctggggcagccccactgtggtgggctcagctgcaccccatcagcctgcttgctgcttactgctcttctcactctttttctatttctcaaaagtgaagaaaaacacaaaaatgtattttcgatataattaactgcacttgacrtattgacaaataggagttcatcatgaaacaacatcttttcctcctggaattgtgaatggcacacaggtttccacgttgcgctggctcacggatgccttctcaatactttcctgtgacttaaaggcaggagaggtgctgtgtgatgtggctgttgctatagcaacacattcaatttttattcaatatcagagtaaatagtcacataagatgaaataagtcatgtctgcctgtggcaacggcagtccctgcttctcgacatgcttccctccctccctgtgcccttttctaacattttcagctgcatttttatamaaatatgcataatatagatttcagtcgcagggacacggcttattgtctgaggtggggacttggtgatgtctcccgctgaagaaacggaggcccgccttgtgcctgggtcttagtggaaggcaagattgtccctgcaggttccctagggagcctggctcacgtggcaccaaagttcatttttatttaaacaactgaactctagggatgttcataaggtccctcagtgtgtaataatccagaaacccctttcagtgggtcaacccatcagacttggagttgcttaaagagatgaagaaaattaacaggatcctgcaccctgaaagctcctgctgcagctttttcagaacggcagcagcacagtggcagcaacagttgtgatgctcgccccctcccggggtgtgttccacacttcacatgcatgtcatctcccttgtccccaggaggcaacatttcacagaggggagactgaggcaggagaagtgacatggcagaaccggcagccggtgccagcaccaggcagcctgactcaggccaggtcgcactccctacactgagccccacatcaaattaagttccttttctcatggagattcctgaaagctgaaatgtccttagctacatctatagcacattcgcacctggtatactccatgaatatgaaacttttacctggcagagttcatgagatacaggtgggaaaccctaattttcaaccctggaattgtccagctagggacatggacgctgatgagcagagcccagaggtgtgtctgtcaggggaaactctcctgttggggccagcaggaggaacttggcttgtttccagcgtcaggcgggtgcatctgcatccccttcagggaccctccttctgaaagccccatgcccttctgctcaggtgcctttctctgcccaggtgggcatcaggtgccctggagaggctaggcctgggtggctgccaggatgcattgtgtccaatgcccccagcccaggcccacctgggcactgtggagtggaggaacgtgctgcaggtgtaagggcagccttgctcccgagacagtgaacatggagccaagcccaccctggtgggggctgtcgttccagccttgagaccrccctggcatcacattttccataatcacttatcagggcagccactgagcatccaggccaactcaggtaccccttttgcttgagccagtggcctcaagctactactctgtgtggggaagaaaaagtagtgtctctgttcttctgagttcctacgaggggtggactcctgtaacaaaaaaccgattcacaagagataaacaagccgaagtggattcacatgtgcacctcctgcatccatgagccatacccagagaaacgggtcaatcacaaagaggtgtgtagactcaggcttcagcaccatcatctgctgagacagagcaggaggagcaatgaggaggtgatagggtttggctgtgtccccacccaaatctcatcttgaattgtcactcccacaattgccacatgtcgtgagagggaactggtgggaggtcattgaatcatgggggctggtctttcccatgctgttctcgtgacagtcaatgagtctcatgagatctgatggtttataaagggcagtttccctgcacatgctctctcttgtctgccaccctgtgagatgtgcctctgaccttgtgaggccttgtgattgtgaggcctccccaaaaccacgtggaactgtgagtccattaaacctctttctttcataaattgcccagtctcccgtatgtatttatcagcagcatgagaacagattaacacaggaggggaccagagaagccggtcagcaagggcaaggcctgtcatgcaccctcagtcgagccctctgcattgatggggtttccagtgacgagagccgtcctcttccaggtgcagagaggagccacccttacaaatggaggactcctttataaacatagatctctcttatagaagagaatcaacttgttttcagagcttctcctatatcttcagtttctcaaaataatccttatgccaaaaaggcatacatttattaggatggtgtgttctggtctctgacagtcattttggggtgctatgttctggtctctgacagtcatttttggatggtatgttctggtctctgacagtcattttggggtggtatgttctgttctctgacagtcattttggggtggcatgttctggtctctgacaggcattttggggtggtatgttctggtctctgacaggcattttggggtggtatgttctggttttcgacagtcattttggggtagtgtgttctgatctccaacagtcatttttggggtgatgtgttctggtttctgacagtcattttggggtggcgtgttctggtctccaacagtcactttggggtggtgttttctgatctccaacagtcattttggggtggtgtgttctagtctctgacagtcgtttttggggtgatgtgttctgatctctgacagtcatttttggggtggtgtgttctagtctctgacagtcattttttgggtggtgcgttccgatctctgacagtcatttttggggtggtgtgttccaatctccgacagtcttttctggggtggtgtgttctggtctctgacagtcatttttggrgtgttgtgttctggtttctgacagtcattttggggtggcatgttctggtctccaacagtcattttggggtggtgtgttctggtctccaacagtcattttggggtggtgtgttctgttctctgacagtcgkttttagggtgacgtgttctgatctccaacagtcatttttggggtggtgtgttctggtctctgacagtcatttttggggtggtgcattccgatctccaacagtcatttttggggtggtgtgttctgatctccgacaatcattttttgggtggtgtgttctcttctccaacagtcatttttggggtgttgtgttctggtttccaacagtcattttggggtggtgtgttctgatctccaacaatcattttggggtggtgtgttctgttctctgacagtcattttcgggtggtgtgttctggtctctgacagtcatttttggggtgatgtgttctgatctccaacagtcatttttggggtgatgtgttctgatctccgacagtcatttttggggtggtgtgttctgatccctgacagtcattttggggtggtgtcctgacagtcattttggggtggtgtgttctggtctccaacaacagtcattttgaggtggtgtgttttgatctccaacagtcatttttgtggtgtcatgttctgttctctgacagtcatttttggggtggcatgttctgttctccaacagtcgttttggggtggtgtgttctgttctccaacagtcatttttggggtggtatgttctgatckccaacaatcatttttggggtggtgtgttctgatctccaacagccattttgggggtggcatgtttttatctccgacagtcattttggggggtggtgtgttctggtctctgatagtcatttttggggtggtgtgttctgttctccgacagtcattttggggtggtgtgttctgttcttcaacagttttttggggtggtgtattctgttctccgacagtcatttttggggtggtgtgttcttttctctgacagtctttttggggtggtgtgttctggtctctgacagtcattttgcggtggtgtgttctggtcttcgacagtcatttttggggtgaggtgttctgttctccaacagtcatttttggggtggcatgttctggtctttgacagtcatttttagggtggtatgttctgatctccgacagtcattttgggggtggtgtgttctgttctccgacagtcatttttggggtgatgtgttctgttctctgacagtcatttcagggtggtgtattctggtctctgatagtcaagtttgggatggcatgttctgttctccaacagtcatttttggggtggtgtgttctgatctctgatagtcatttttggggtggtgtgttctgatctctgacagtcatttttggggtggcgtgttctgttctccaacagtcattttggggtggtgtatctggtctctgatagtcatttttggagtggtgttttctagcctttgacagtcatttttggggtggcatgttctgttcttcgacagtcatttttggggtggcatgtgctgatgtatgacagtcatttttggggtggtgtgttctgttcttcaacagtagtttgtggggtggcatgtgctgatgtatgacagtcatttttggggcrgcatgttctgttcttcgacagttgtttttggggtggcatgttctgatgtatgacagtcatttttggggtgatgtgttctcatctcctacattagaaactgatggatggtggagggccctagacactgggccctagtagctctttagtagtttacaggcacaaactttaccttcactttcattcctgtgaaacaaaggatctattaaaagtctaattagggttgtgtgtgtgcaaacccttttactgaagtgccaatctatttttttttttttaatgagatcataaagcaaaaagaacattcttaagaagtaactttcttctgttgacaagcacttggacttaacgttccacgaaaacaggaaatcctctcctttctcgtaggcagagacgcatccctgcagtcacaggggcttggcctcagatgtctagggtgtactgagggggtgttgccatgttgaccatgtgcgtcctctctggctgccacaacagaatactgcagagtggggggcttcagtcacaaacctttattgctcacaatcctggtggctgaagtccaagatcaaggtgtgggcagggctggtctctcccaaggcctctctcctgggcttcagatgccgtctctgcatcctcaagtcctcacccctctgtgtgcacctgtgtctgcatctccttcctacaaggatgccagtcacatgggatcaggctcaccctgatgaccacattttactgtaatgactcctgtaaacacccccatctccacataccatcatgacctcattttaccataatgactactgtaaacacccccatctccacataccctcatgacctcattttaccgtaatgattcctgtaaacacctccatctccacataccctcatgacttcattttatcataatgactactgtaaacacccccatctccacatatcctcatgacctcattttaccgtaatgactcctatagacaactccatctccacatacagtcacattcggaagttctgggattagagcttcccataggcactttggagagactcaattcagctctaaactctgaccctgttagtgtctcatttaactcagagtgcctttttatcatttgttccaaaagatagcattgggtcaagctagcttcagaggaatacatctatgccattttcctgcaccatatcaaacaataaattaaaaagtgaaaaattctaccaaggcaatcagggagagtgaattaatgaataaatacatgaataaaatttagcgcgatttttagaaggataataggatagttttgtccaaaaacccttcagatccacggttcagtctgagccatccagccatagcaataaagtaaaaattaccacatggtacaaatgtgtcaccgtcaacgatgctcagcgtggagatggcctgcctgccctcagagctggagaaggacgtggctgcatctgcctatgggccgggtcccttgggtgattttgcagggaggatgtacagggtcctccttctgccaacgccacatgatgaccaagactcacacctcccaggagctgccggtgccccctctagcacggggaccctaaaaaattcttgatgttgaagcaatataacttgtgttgcaattttacttctttggcagtgttgtcttttcctttgcgatgtatttcctgatagaagccttttcattttggtgtgcggcgggtagagtaatgaatttattttagaaatgtcagtggcattttatgatgctaccttcagcagcaacatcacagggcctgattgtgaagctgctaatttacagatcgtctctaagtgaacgcaaacaaattctggtcctcagagccctgctaatatacaatgttcaatttttaatttccagtccgtcttagattacggggatgaaaaacaatatttaatccctcgttaacacatgaataagcggaagctgtcattttcaaccagacaataacgggattatctcaaggactgtcagtttatgtgaaaacattatgttgcccaaattttcataaaaattagcagtggataatactcaagatcagagcaatggaaagagaaaaatatgcattcatggtaataaatattcatatttgtctgctcaggagatgaaaatctaatcaaggggctattgaagctctggctttttttttttttttttttaacaaagacgtttcatctaaattgggtttgatatggaaattagtctcactcaaagtcctccaggccacgagtaagccgggctcacgtggggtgaggtggccactctatcagatgtcgcttctggcatgggcctcttagacaacagccaccaatgctggggttcacactgtctctcttggttcagcatcctcagagtttaatgcaagggagtgcttggagccccctccctttttaaaggaaaaaaaaaatatgatttcatgccggttaactcccagctactgcagggttaaaattgtctgtgtttttgcttttgttgacaattaccataaatcagaagacactctgcatggagcttaatgaaatatgtatgattttaaaaagaaaagatgggagctgcaggacgttgctctgtgtgtgtgtgygtgcacgtgtgcgtgcacgagtgtgtgtgtgtgcacatgcacgtgcatgcgtgtgtgtttgggtgtgcgtgttggggggtgtgttcctgctgttctcatggaggctgtgcttttcctacacatgggcaggcttgaaaacacagaatccaagagctcctcggtgagtaagtgtgggtgcacggtatcacactgacccttccagccccacggaatccgagagctcctcggtgagtaagtgtgggtgcacggtatcacactgacccgtccagccccacggaatccgagagctcctcggtgagtaagtgtgggtgcacggtatcacactgacccttccagccccatggaatctgagagagctcctcggtgagtaattgtgggtgcacggtatcacactgacccttccagccccatggaatctgagagagctcctcagtgagtaagcgtgggtgcatggtatcacactgacccgtcaagccccacggaatccgagagctcctcggtgagtaagtgtgggtgcatggtatcacactgacccttccagccccacggaatccgagagctcctcggtgagtaagtgtgggtgcacggtatcacactgacccttccagccccacggaatccgagagctcctcggtgagtaagtgtgggtgcacggtatcacactgacccgtccagccccatggaatccgagagctcctcagtgagtaagtgtgggtgcatggtatcacactgacccttccagccccatggaatctgagagagctcctcagtgagtaagcgtgggtgcatggtatcacactgacccttccagccccatggaatctgagagagctcctcagtgagtaagtgtgggtgcacggtatcacactgacccgtcaagccccacggaatccgagagctcctcggtgagtaagcgtgggtgcacggtatcacactgacccttccagccccacggaatccgagagctcctcggtgagtaagcgtgggtgcacggtatcacactgacccttccagccccacggaatccgagagcttctcggtgagtaagtgtgggtgcatggtatcacactgacccttccagccccacggaatccgagagctcctcggtgagtaagtgtgggtgcacggtatcacactgacccttccagcccctttaaggagcctcagggtccgtgctcttgagcactggccggcccagcacggggatccctggtgcatgaggtctcccgtggaccacaggccaccaagagggtatcttttggggaactgaatctttgctctcttacacttataaattcctagacagcaaagctgagatgggcttgtctgagcctcaggaaggaacacgggcaggcccttcagagtcagagagccggaacaccgccaagtagccttcgctccgcatcaagaacgcttcctactgacatacgcgggattttccttggggcgctgttaattatgttacagagctgaatgtttatattcacacacattttaaaatctcacccctgacatatttcctgttcctcttctccccggtcaagcagagctgatcgtgggatgttttgatgattttggcgaagggcttggggaatgtggtttctgaagaagacgtctctgagcagactccctcctctcctgtccctgctgctcccagctgtgcagtgcctgttcctgagacctggctctgaggcccacagggagggttggctgttccccagcccactgttaggaacaccttctgcaccacccaccaagacccgggctttgatgctgggtccagagacatcaccttcctctttgtgacgtgggcggggtgcacggaggggaggagagaggaccccgaggaaaccctgggtagggcactcggacctgggatccccgaggaaaccctgaccatggcacttggacccggggccccgaggaaaccctggcgctgcactcagatctggggtccccaaggaaaccctgaccatggcacttggacccaaggtccctgaggaaaccctggcgctgcactcagatctcgggtccccgagaaaactctagtgtggcactcggacccggggtccccgagaaaaccctggtgctgcactcggacccggggtccccaaggaaaccctggtgctgcactcagatctggggtccccgaggaaactctagtgtggcactcggacccggggtccccgagaaaaccctggtgctgcactcggacccggggtccccgaggaaaccctggtgctgcactcagatctggggtccctgaggaaaccctgaccatggcactcggasccggggtccccgaggaaaccctgaccatggcacttgcacccggggtccccgaggaaaccctggtgctgcactcagatatggggtccccgaggaaaccctggtgccacactcaggcctggggttcctccagggactgccacatcctgcaccttcccctgtgggtaaaggctagcgaggccgtccagggcatcaaggcccatttcagaacgtcgtcctcctggagggccggcgagctgcgtgtccctagtgcctcctgcggctcccagaggctcccccggcatgcccccgtgctggcactgtccccaggtggctgctggcacccacacagcagctgccccgaccttccctcttagaaagttctccgccctggggtgcaggggccatgtgaagccccatagagcaccattcccgctgcccccgacccatcctcactcttggggtgcagtgcggcctctcccagccccacgtgggggcgctggtcttcccaaggccaccctggtggacgtggaagctgctgattgccgccgtctgcctgccttggccgtctgtgcatcttcctgggagaaacgtcttctagggccgtttactcatgagaggacctgccaaggaactagattatttgtggtggtgtcagcatccaacagtacttttttctaaggaaagggataacttgccacaggaaaagaaaatgctgtggctttagacacagccacccatcctgtctccaggctctggtgacagactctgtcctggggccgctgctggttaattcaggcttctccatgctgggaattcgcttccagaagagtggcccccaggatgctttgccttcagggtcagccctgtccgccttacctcaggcccagcagaaatagcaggggatgggtcacaacaggagaccaacacaaaaacagggcttggatgagcccactcgggcacccagtccatggtccagggcactgaggtctcgtggagaggagggagggtgagcgtggactgcattgtttgcaaggagtcgtgaattctgacactgtccaaggagctgcaggtgctgccccagatggagacagccaggaacacctctaggccactgcagtggtgatggccaaggcatacctgccctgctgaccctctgcagccccgtgccygccctggggatgcctggcctgggggctcggcccctcctgaccctctgcagcccggtgcccaccctggggatgcctggccttggggctcggcccctcctgaccctctgcagccccgtgcctgccctggggacgcctggcctgggggctcggcccctcctgaccctctgcagcccggtgcccaccctggggatgcctggcctgggggctcggcccctcctgaccctctgcagccccgtgcccccctggggatgcctgacctggggactcagcccctcctgacccccgaggcccaaggtgctgctgctgctgcagccaccaggggtcacacttgctcgcctcctgcacaggccatggccccacaatcagggctgcaagaagagatggagaaagagacaccttggaagtggctggaacgatctccctttggagtcaccctgtctgctggaattaagacttctgggactgcacagtgaagttcccggcaatgactcattttctgatattggtgcctgaattgcagcttccgtggctgccacttcaggaagataacgtgtgacccggagcaaggttatcagaaactgccgatagaggtttgccacctcccaccatgaatacggacgctgataggaggaagccctcacgcgctccctcggctctcacggaacgcctggaaactccccagctttctcttgtttgaagaaggagcccccaggagacttccaggacagcacggtctggaccgtttccaagccctttaggaaaactttgcagcaaaattcagcatttcgaaaatagtgaagtcaaggtgaccccgacacagcctgggctcctcctgggacatacttcctgtacggctgtcagaccacaagtctacccaagggcatctgtttgcctgtgagtgagcgtgtgtgtgtgtgtgtctgtgtgtgcgcgtgtgtgtgtctgcgtgtgtctgtgtgtctgtgtgcatgcacgtttgcgtctgcctgtgtgtgcctgtgtctctgtgtatgtgcacaagtgtgtctccgtgcacaagtgtttctctgtgtatgtgcatgagtgtgtgtgtatgtgcacgagtgtgtctccgtgtgtgtatgtgcacgagtgtgtctccgtgtgtatatgtgcatgagtgtgtctctgtgtgtgtccatgagtgtgtctctgtgtgtatatgtgtatgagtgtgttcgtgtgtgtgtgcatgagtgtgtgtctgtgtatgtgcatgagtgtgtctctgtgtgtgtgtgcatgagtgtgtgtctgcttgggttactttgctacctgcaagcaaacccctgccttgtgctgctgggtggcacggccttctctgcccccctccgcttctccccggaccccgggagctgtctgtggagcgagtaggaaatccccctactcacgagaggccgtgcaggtgaccccgaagcttcactgaaataaaagctcgagttaagggggacatgaacttccttgtgaacatggttggctggcaggaaggcactgtggctggggccatgtggacagaagcagaggcaggatcggggcagggcaggagagaggggacaggagggggcagaaagcaggagctgggtcaggtccacttcacctgcgtgtgtcacgttgaaaatgggctgagaggtgggcgaggccaagtggagcactgcagtccaggcttaggggctgtgatctgatttgcaggccatggggagccatggagtgttggggtgaagggagcagcctgcccagttgtggagggggaaacagagggaggccagaggcagactgagggccgcttcagcaccttccgcaggacaaggctggagctaggcagagcagcagagaggccagagaatcgttgcagaaggcctggtctgaagatgtgtgatgtgacgtgccaccactgagctgtgccaggcctgggccacctcactcccccgaggtcccgagagctcttcccgaggctgctcagggtcctgggactttgccggagttgtggcagacctagagccgtcaaagtcagtgggacaggaaacaactttccccggacggccctcctgccgtgccctgaagcccctcttgtgcccagctggtygtccatccctcctcctccgctttccacctcctcttctctcccaggtgccccctgctgacctgtgcccccagtgtgatgccgagtgctgcgctctcctcagtacctgaaagcagggccctctgcccatcccagagaccagcgcaggaaattctgcttgaggacagtacgttctcctcccggcccccacgacgagacagaccttgaggacagtacgttctcctcccggcccccacgacgagacagaccttgaggacagtacgttctcctcccggcccccacgacgagacagaccttgaggacagtacgttctcctcccggcccccacggcgagacggaccttgaggacggtacgttctcctcccggcccccacggcgagacggaccttgcagacgctcccagcacatgtccttggcacacgtcggagcaaagcctcggggcgcggccctccgggggtttctccagggaagcgagcaaactgggaagcgtatcccatccagagcctcagacgaggtcaggccaggcggctgctttctttcctggtgcacattcatttattcaacagatacttgctcagcactcgctggtggcggaaacattggtggataaaggagagacagtcggagcctccccctcccacaagcagcgaggaagcaggacttcagggcaggcaagaggcccggtcagagggaatgaggcagaggtctcagtgcaaaatggaagcgagagcctaggagacagggctcgggtgagggacatacacggccaggggcagttcccctgttccgtggccagttcccactttccatggccaggaagctttgtggcttcctctgtcaagttctagtgcagacagaaaagtgtcccaggaagaggacaagcaccacctgggaaatgagtgctcccagcaaggggaggtggcctgcggacatgggtggcccttgaaggggagctgtggagaggcagcagcagacagggcccacacagaaagcacccgtcacccctctaccccgccaggaagctgaggaaactctcaggagccctgacagggcggggaggggacactccaaggaggggcatgtggactgagggcctcagggactctgcaccctccttctacctcctgcaagatggagcctgccccagttggacaggcggcctgggcgcaagagcgcctctcagtgcttagttataccgggaaaccaaggaggccaccaagtgtcaggacacagttacatgggcattgggtaggggaaacagctgtgaggacatagcgtgggaaggcactgggtatccatgtgtgcggaggcactggatatgcgtgtgtggggaggacactggatatgcgtgtgtggggaggacactggatatgcgtgtgtggggaggacactggrtatgygtgtgtgggaaagacactgggtatgtgtgtggggggaggacactgggtatgtgtgtggggggaggacactgggtatgtgtgtggggggaggacactgggtatgggtgtgtggggaggacactgggtatgcgtgtgtggggaggacactgggtatgtgtgtgtggggaggacactggatatgtgtgtgtggggaggacactgggtatgtgtgtatgcggaggacactgggtatgggtgtgtggggaggcgctgggtatgtgtgtgtggggaggcgctgtgtatgtgtgtgtggggaggacactgggtgtgtgtggggaggcgctgggtatgtgtgtgtggagaagcgctgtgtatgtgtgtgtggggagsacactgggtgtgtgtggggaggcgctgggtatgtgtgtgtggggaggacactgggtgtgtgtggggaggcgctgggtatgtgtgtgtggggaggacactgggtatgtgtgtgtggggaggacactgggtatgtgtgtgtggggaagcgctgggtatgtgtgtgggaaagtgctgggtatgcaggtatgggaaggacgctgggtatttgtgtgtggggaggtgctgggtatgcgtggccacatcctgtgttctggagctgagtgcacatgtgtagacatgggtgtgtgtgcatttttgtgggtgtgtgggtgtgtaggtatttaggggtctgtgtgtgtgtgtgkatgtgtgcatatgtgtgggaaggcatatgtgtatgtatgtgtatatgtgtgttagggaaatgttaaccctaagacattactagtttataataggaaaaaatccctccaaaaataatactgtacctcaagcctttgtattacaaaaaaaaataaaaggaggagggtgaagttgtgccagtgagtcccggttgctcttcaggggccctggggtggtgtcggccaatagagacaaatgccattggcaaacacctagggtgcctcctacatcacagctgccgatgaacgcgaccttgagtccaatttagaggaagcttttggactctcacatcttacaagttctctcagaggtcacgcctgccctttcccataagcagaacaacccaaatcccccaggcccacagttctcatatgtcagcctgcatcagaatcacctgcagggcttgtaaacacacaggttgctggttcaccccagaacctctgactcagggggtccgaggcagggcccaaggatctgtgtttctaacaagctccctgggtgctgccagtctggggaccccactttgagaaccacagctttgagcaactgggcctccccagctgagaaaagaggaaagattggtgcctagttcagaaccgtcaactttggaagctctgggagccagcttcttcgtaaggaagtccaggcagccctgaggcccctaccccagctgtgcagctcatggcctagcgcccccagcaccagcactgcaagagccttcaggtcggggacatttcaacatctctgagccaggccatccaatccccaacatcgaacgcccaataaacccaaagctatctccacttccagagtctcacagaaagatcaacatcaaagtactttaagaaacagatgactgtggtgtgcagccccttacgcaacccaggtgctctgggggatcaaggtgggggtgcaggtgcgggaggctggcacgaggccatgcagctcctggccccagagcaggattcctggcggctcacaggcattactctgagttcagccagcaccccaagcagccatcaggcttgttatggaagagattctgaagaaggtccatggaaaatgtggatcatggaaaactatgcatggatttcaaaaatctttctgcaccaaaataaactcatactaacttgttgtaacatgtctgaacaggatctagtttaaggctaggaagagaatatatcagtttgaaaagagcccctatcagagcaacatgaattctgctaaaattgaaggaagaacaaacatcaaaattgtggtgaaacatgggtggaacaatgatgaagtcattgatgctttatgaaaagtttatagggacaacaccccaaagaaatcagcagctttcaaatggagaactcattttaagaaagaatgagatgatattgaagatgaatcctatagtggcagaccccctcatcaatttgcaaggaaaaaattaaccttgtttatatcctaattggagagraccaacaattaacagcagaaacagcagccaacaccatagacatctcggctggttcagcttacataattctggctggaaaattaaagttgagcaaactttccactccatgggttccaaaaccattgcacccagatgagctgcagccaagggcagagctttcaatggaaatttttaacagcggaatcaagatcctgaagcatttccttgaagaattgcaacaggagaggaaacatggctttaccagtaccatcctgatgaccaagcacaaccacagcagtggctaccgagaggcggaaggggtcccatcgaagcaacagcagactgatcaagagcaaaggtcatggcagtagatgttgggatgctcaaggcattttgcatgttgactttctggagggccagagaaaaataacatctgcttattatgtgggtgttttgagaaagttataaaaactttagcagaaaaatgcctgggaaagcttcaccagagagcccttctccaccaggacaaggcttcagctcactcctctcatcaaacacgggcaatttagcaagagttccgatgagaactcatgaggcatccccctacagtcctggtttggctccttctcacttctttttgttttccattcttaaaatatatccagagggtacccatttttccttagatagtaatgggaaaaagactgcattgatgtggctaaattcccaaggtcctcagtgccttgggaatggactaaatggtgggtttgatcccttgcaaaagtgtcttggccctggtggagattatgttgagaaataaagtttatatttttatttttaccttttaatccaatttttctgtgaactttttgaagtccccttatatttgtctgctaactcaggaaaaatgtaaactttttctttactttggcattaagtgtaactctgtcatcaaatgaaattatccctaggaattttatatgcatggggataagtgagcggcctggagtccacagacctcccagcaggcctccaaggccctacccagacctcccatgctgggaggctctgcaagtacctaagcacacgcttaggaccctggcaaagttgaggtatcaggaaagatttgtagaaagaccttgatattttaataaagaaaacatcttgtcatccagggaaacatcagaaatttgacttgctcacacgcattttaaaacttagtacttacagatttggaattacacgtgtcagggtgtttcgggacattgggaagtctttatcccactggcctttatgaatcttcatctggttctacatggaactgagtccccaaacgactgtggtggcagaaagatggagggcgcgggaggcctggcctcaccactggtgctaggcaatgctaaatgggttgtgtgaccctcctggccttgagttccccaagactgaggtggcatctcagatgatcaagcagaattttccatgtcgagcatttcccagttaccagccacgcatggcccggagtgcacagcccagagggagctcacaatacaatgaagaacgaccgctgttgagtggatgggcgagtgggcaggtgggtgagggagggagtgagcaagggaaggcatagcccctcatctcgagggctcagagttatttccccrgccagtcctcaggctgggaaatgggctgcacctttttctccatgtgtcatactttyttccctttaaaaaatttaaccagttcttggcattggtagttttgctaaattaaaccagggaggacctggaagacagcagcgcagccctgacactcacaaggccagtttcctccaggcatggttttaatccagaggctgggtctgctttcctacagctgggccatgagctgctgccccgcagagatccaatgtcctggtgtcctacgttcatcgtggagatgatggaaacaagctcagacaggaaaactcatcacttggcaaactccaggcctggggctgcctgcagagagccctgttcagatgggcttgccgagtcccagcccaccacctcgatgggaagcagttgtaggtgcaccactgggctgtcggagccatcgggaaaggaacccttcctgtgcctggccttaggataactgtgtctggacccacagcccacaccccactcgtgaactgtttcgggccctttctaaggtgcatgtgggcctcttgcccaggatgcgggctgggttcctagaggactcaggtgatcctacctgcggcagtgagttaatctccagggctcaggaggcctgctgtccagaggaagtctgggcagcttgggctggcgcaggcacggtgcccccagtcctgctcttgtggactctgggggcatgctgggcctgggcacacctccaccacgcctgcggccctttgctcacggactgtggattggatctgagcagtctagggaccagctcctcgggcccatgcagaaaggaagagaaggagtctccctggactggattctgggagggaccctcactctttctgcctgaatgaacaytagtgcgtggacttttccagtctttccatctgttctgttttgaagtttattcatgttgatttacgtgaatctagttcactctttttgcctctggtgtcacccttcagtctgggcggggtggtggccgtgtatccagggcgtcagggacagggtggtggccgtgtatccagggcgtcagggacagggtggtggccgtgtatccagagcgtcaggggcggggtggtggccgtgtatccaggtggccgtgtatccagggcgtcagggacagggtggtggccctgtatccagagcgtcaggggcggggtggtggccgtgtatccaggtggccgtgtatccagggtgtcagggacagggtggtggccgtgtatccagggcgtcaggggcggggtggtggccgtgtatccagggcgtcagggacggggtggtggccgtgtatccagggcgtcagggacggggtggtggccgtgtatccagggcgtcaggggcggggtggtggccgtgtatccagggcgtcaggggcggggtggtggccgtgtatccagggcgtcagggacggggtggtggccgtgtatccagggcgtcaggggcggggtggtggccgtgtatccagggcgtcaggggcggggtggtggccgtgtatccaggtggccgtgtatccagggcgtcagggacggggtggtggccgtgtatccagggcgtcggggacggggtggtggccgtgtatccagggcgtcgggggcggggtggtggccgtgtatccagggcgtcgggggcggggtggtggccgtgtatccagggcgtcgggggcggggtggtggccgtgtatccagggcgtcgggggggggcggtggtggccatgtatccagggcgtcgggggcggggtagtggccgtgtatccagggcctcaggggcggggtggtggccgtgcatctcggggcacaggcactgcttctgaggagaccccagggtgtgtgtggcaagcactggggcgagcctgggactcgggccagacagcctcggtgcagaccctgagctgggcactcatgctgggtgcctgggagaatgcacaccagcctcagctccacctctatggacgtgtttcctgcagacctcatggttgtcatggcaagggctgagaggcacatgcgctgtttagtaggtcatgagcactgtgtgtatgtgtgtgtgtgtgtacacgagggatatgggtgtgatcgtgcatgttcgtgtgtgtacatatggtcgtgtgtgtgctcatgcatatgtatgtatgtgtgtacatgtggacgtgtgtgtgctcatgtgtatgtgtgtgcttatatatgtatataactctgcatatgcatgtgtgtgtatgtgtatttggatatgcacgtgtgtttgtgtgaatatgcaatgttgtttcctgctcactgactcttaattgatgaaacaaatgcccagcaggccaggatgggatttgagccccggctcatggtggggcctagaaagtgacgactactttccctttgcagaacccgggcctcactcaagtggtgtttgtgtagaaggaaaagaaaccacaaaggtgcatttgactcccattttctcgcatctgctgagagcgtattcatgcacaaaagggaaaggtccttgttctaaagcaggagagtacacgtggctgtcagaggttgcgcggcagcggggaaggaggccggggagcatctgtcagttgccgcaatgcaggggcgaggtcacagaacagagggtgtgctggctgctggggagggtgtggggctctggggccttgaccctgttaaccgtccaccctgccctcccgtctgctcctctgacagcagcttctggaggccgggcactgtggccaggctggcacaagtaacatcaggacctggggctgcagccccaggagggcccattcacctggctgtgacccacaggcaaataccgcacaaaacccgtggcccgtcttgcacacagaggccactggaaacacagataaggctgtgtgaactcatctctccactgtgaagacaacactgggaagacagcagatcctcctggcactcgctgagggtctccactgccctccagatgccgagctcccgccttccttcccccracccccgacaggctcggcacagtcagaccagctttgcagggtccgtcgtggccccacggtgagggtcctgcttgcgagctgaagctgagatggacgtgtgcatgcatgaggatgagcatctctgtggtttaggtgaggtggggtcacccacctccaggacccctgactaataatagcgctgagattcaaactcaggtagcagatcagttaggatcacccaaacaagtggacatgaaccagtgggatgttcagcagagcagaagccgattcctcgttcatcccctggtgcaggactgcggaatgcgtcagctgggcagtgccaacctgcagcccctcaggggccacccccacagtgcccggctcccgtctcacctagggacctccatttcccrgcagcagcacttgggaaggagcctgcgtgggccagacccagggagtgcaccgctcctctccatttcggtggccagagtcaacccccctgcccacccagccacacatgcacacacagccacgtgcccaggaggggagtgcttggatttgggcctatgtggcacagccttgggctggacctcagagacacagrtcctaccacgaccccacacaggtgcctgccagctgtgagcccttgtgcaggttgggggtcagggagggcctgagatggcggcattttatgcgggggcagaaactgcaggttcaggcacagaggaggggctgtcacctgccagaacatgcctccctcgatggtaccaccttggggcccaaacctgggtctcagacaagcactttgtcctgagatactgacgtctatgagcgtttgagggaatacgtgctcaaacctgacctcctgcagagaggatggggcagctggttcctggccgccaggctgcgtttcagcagctcacaggtgcataccacacacagccccgccgtggccagtcaccgtgggccagccccacatggcagcttccagaggcaccacagggtggcggccccagaccttggagaaagtggcacaggcaatgtaaacctttgcgaccccaccatcctctcaatctcatccccaatgcctcccctggccccaacaggacttcctcctgtcggcctggaaaactagagcccgggaggaacatctgcctaatacagcccatccccaggtgtcagcatccggggcmcgtccccaggtggagcccgggaggaaacatctgcctgatacagcccgtccccaggtgtcggcatctggggcctctggatggtgcccagtgaacctcgggtgggctggaccctggatggggggacccagtcacagatctggatggtgcccagtgagccttaggccaggctggaccctggatggggggacgcactcacaccctgtgtgtgaacagtcgcttggaaggagcagcgatgccgggactcagcttttctgcatcttcagagcagctttcaaatgcttttggatcaaaaccacgtggccggcagaaatcgcacaattagcttcgacatagccgtggcttcgggcagggtggtcctggccagaatcacacatgcagagagcgtttttggagcctgtactgtctgctcaggctgccgaggcaaagtcccacagacagggcagcttaaatgatggaagtttcttttcacacggctctggaggctggaagtccgaggtcgaggcgtgggcagagcccgtttctcctgaggccactcccccgcctggtagatgccatcttcatcttcaggtgtctccacacgtgcacgtctgtctctgtgtccagatatccctttctgataaggataccggtcctgctgggtcagggtcgccataagagcttgttttaccttcatcgcctctgtaaagcccctgtctccaagacgccacacgctgaggtcctgggggtcaaggctgccacatgaacttgggggcgcattcagcccatcacagggccagtgaaccacgctgcagtttttaaagaattatatttatatctcaaagttttgaattacttttaatttttttyttttgaaaaccagttggtggtataaggtttcttgggcacaagtctggcccagccaggtgttcagcatcaactgtgacttcacaccccgagctagtagcatgggccaggattgaccctggcagaggtctctgagacgcgtcgccgcccaggcaagctgggaaggaggggaagacctcgtctccactctgcactggggcattgggcagcccactggctccgtgagacctgtaaaagcaaaggttttgtggcacagcaggccgagagggtgccgtgtgctaccctcctgcagacgtacatcagccacgtaaggcagaaaaatcctgtccaaaagtctgacagattacagcggaaccttctcaaggctcccagaccacacagcctacttctcctgtaagactgatcagagcgcttggagaatgctggtccatgcaaaactgaatccccaggtgtgtccagggccccagagccggagcacaggaggcactggcttggctgccgtcctttcttgtaactgcccaccaagtgccgcctgacgtgaatcccagcctcctcgcggtgccgtccgagctctgggctttgtgtgtgtcatgtccaagttgacaagtggctgtgctgtgagcgtcactgtcctcctccccctcatctttcaggaaactgctgtgactttaaagccggtcctcgccgcttcccgcacacctcgccgcttcccgcgcacctcgccgcttcccgcacaccaccaggcttgtgcttcccggagctgggtctgtgcacgtggcatccgtgcctctaaaggcgttgcaggccggtaagaggccctgctattttccattcatcccataagcgtttttaaatctcagggactgtgctcagcactggaaataatttctagaacatgattcttgaccagccaagcctgcaccggtggttccactctcaaggcattttaaagcaaggtaacaaatgtatgttgaccagctgggcacccatttctgttctaaaaagagagatgaatatcaatgttaaaaagtcatggatcctgaccccagttagtaaataatctagtggagaaatacaataaatgcacaacaattaaataagccggtggtgtacagcaaattagcacacgtgtgaaataagcaagacattctgtgttcagaagggaatcccctagccgtgggctcaagtctgtcagggaacttcctaacagagggcacatgagctaatgctataggctgaactgtctccgcagaaagatatgttgaagtcctggacctcggcagctcagaatgggaccttccgtggacataggactgttgcagacacagttcgcttggtgaaggaggcaccgtgctgcagtaggtccttgatgcggccatgtccctgcgacaggaaggacaaactccagcacacagagtcctcgaagcagcagtgtccctgtgatggggaggacagactccggcacacagagtcctcgaagcagcagtgtccctgtgatggggaggacagactccggcacacagagtcctcgaagcagcagtgtccctgtgatggggaggacagactccggcacacagagtcctcgaagcagcagtgtccctgtgatggggaggacagactccggcacacagagtcctcgaagcagcagtgtccctgtgatggggaggacagactccggcacacagagtcctcgaagcatccgtgtccctgcgacggagaggacagactccggcatgcagagggaagccgtctgcgtggctcggaggcaggagggaagcgctgtgtctgtgggccgagggctgctggcaacgcagaggctgggagtcaggaagggtcggtgtccccttcaaggccctgcagacacctccaagcaaggtctccaaacccagcctgtgagactgcaggcatccactgtttcaagcccatccgtctggagtcctttgttctggcagccccaaaagcctcacacagctcggctttgagtacagggagcgtgtctgcaggtaaggtggggaggccacacagaggcacagcggctgggccctgcaagactcagggagggcgggccagcatgtccgagggcaggaggcagatgccacagggcatcaccagctgcatgttgcacctcgacggcaaaacacagaagccactgcccaccgcagggagcgcagactgaagggacccgggctccttggccgagctccagccggaggtgcttccggtgcaatccaggcctctcatcctcccacggattccccacagagggcttcggttccattattgtatagacttcacgtatgtaaaaggtacaggaattcagcatttggaccccgtggggcagtgtcaccatggagcacgcacagggtgcctccctgagctggcacatccctggaggcatgcgtgcctctgccgacatcccaaagcgcccgtgctggggtcccacatggtgtccgctgtgccgtggggttcctcttccaacccccacaagaaagagaaggtcaccctgccccccacctctccacagctccctggactgggccacatttctttatcctcttcttggtttttaattaactttgggccagcccatctgtgcctgttctggactccagttttgacagctactgactgaattgcctggtcagttccgtgaaaaactagaaatagaaatgcacccggccagctgctgcctgagctgaccagccccggccgtcagtggccttccctggttggacggaccgtgaatgctgccagttctgtttcattttaactatgtgtatttgtataaatataagaaactgtctgctctctacccacagagtaattgtctagctctatcatctaattatctcaacacgtttagtgagcgagatattaaggcccagattagatattaaaaggcatcgttaaagaacagaaatgagatttgcatggagtggtatctagttccagcgtggaaacgcgttcacacagcactcaattagatatgtggactcagctctgaaacgttcctataggagaacaaagatgaaaattcattactacctccaaatactgccaactccgccatttcttttaaaactgcagtcttgggaagctccaagagtgttcgataataaccaagacgtggatcctgtgtgtgaaaagtggcccagctcctggagaggcgcgaaggctgtgggtggactgtggggtgggctgcttctctggggtcacgtggacatccctagagagagtcttggcttgggcaccaccctcaggtgtgtgtcctcaggtggcctgactgcagtgacctctgaaatccagggtatgcagagatcgcaggctgtgggccctgccaccacaggctggggcctcagggaattgggtctgggtcgttgcaagtctcgaggctcccccagtgggctgctgctccatagcaggctgtccccactctgctccacaggaatcacgaagccgcatgctgtctctggggtctgtgctgcagagctgggggctctccctgcaggagtgtgtacagtggctggggctctccctgcaggagtgtgggtggtggccggggctctccctgcaggagtgtgtacagtggctggggggctctccctgcaggagtgtgggtggtggctgggaggctctccctgcaggagtgtgtacagtggctggggctctccctgcaggagtgtgtacagtagctggggctctccctgcaggagtgtgggtggtggctgggggactctccctgcaggagtgtgggtggtggctggggggctctccctgcaggagtgtgggtggtggccggggctctccctacaggagtgtgggtggtgacggggctctccctgcaggagtgtgggtggtggctgggaggctctccctgcaggagtgtgggtggtgacggggctctccctgcaggagtgtgggtggtggctggggggctctccctgcaggagtgtgggtggtggctgggaggctctccctgcaggagtgtgggtggtggctggggggctctccctgcaggagtgtgggtggtggctggggggctctccctgcaggagtgtgggtggtgacggggttctccctgcaggagtgtgggtggtggctgggaggctctccctgcaggagtgtgggtggtggctgggaggctctccctgcaggagtgtgggtggtgacggggctctccctgcaggagtgtgggtggtggctgggaggctctccctgcaggagtgtgggtggtagctggggggctctccctgcaggagtgtgggtggtagctggggggctctccctgcaggagtgtgggtggtagctgggaggctctccctgcaggagtgtgggtggtggctgggaggctctccctgcaggagtgtgggtggtggctgggaggctctccctgcaggagtgtgggtggtggctgggaggctctccctgcaggagtgtgggtggtgacggggctctccctgcaggagtgtgggtggtggctgggaggctctccctgcaggagtgtgggtggtggctgggaggctctccctgcaggggtgtgggtggtgacggggttctccctgcaggagtgtgggtggtgacggggctctccctgcaggggtgtgggtggtagctggggggctctccctgcaggagtgtgggtggtgacgggagttctccctgcaggagtgtgggtggtggctgggaggctctccctgcaggagtgtgggtggtgacgggggctctccctgcaggagtgtgggtggtgacggggttctccctgcaggagtgtgggtggtagctgggggttctccctgcaggagtgtgggtggtagctggggggctgactcagagaaccagcaaaggccgtgtttcttttcaggccccccgacaaagggctcccttccctcacaaggctttctcatacccgccgtctttgagtacgtgtctgttcctgatctgagccactggggccaggcctgctgtgtgggcacacgtgctcctggcagacactcctgctttgtgattccacccccaacctcgggatggaggtcaggaccacgcctgctcacatctgtttctcaaacgtctagtgcgggcgcttgcacgaagaggtgctgagacgtgcctcacaggatgtggaggatgaccagttatggacggacacgtggcgcgtcagggaaggctccggaaactttgctgtgtgaacttttctactcagggcacggacctcagagatggatctggttgtcatcccagatgaggaaacaggtcaggcggatgatgcagaaggagctgtgactccccggtggccactggtgggtgtaggagcctcacctggcatgagtaggagcagccacaggctgtggggcgggcaccctctaaacagagccctgcagaaggggctcctccatcacgcgccgagcctgccacacagaggagaggacgctccggagagagaggagcgcagagcctgtgcagatctgccatctcctcctccctaggggatgctcctggcccttgtgtgggtgaacgggtgccgtgatgtggccatgaggcgcacggacctctggactcaacgtggcctctccataggcttgagggaaaacagaaacggtgaaatcaactctccgccccacacgggcccagcttcagtgttgggcacagcagagccccagcttcctcctgcagcatccccctccctccccttccagcgtccccctccctccccatccagcgttcccctccctccccctccagcatccccagctccaccagcaatgccgatggccatgccctcgtgctgtggccccggctgtgactcccactcatggcgcccaagctgatggcactgcagctttgcaaacctggccacctcccttgtcagcaatgcttggaagataaatagaagatgctgctaaaaatttggagaaaaatttgagaataaatcatgagccgtggaagtctgctacacagttgggtgaatgtacaggttgttcaaacctttcttggtgtacactcattgctaagcaatacttaacaggtcaaaaaaagttttaaaaattggaataactatggatgaagtgaccactttgactgacagacatacgaaaaagattctgggtgaggtgagggaaccagcaggtcatatgaaatccaccccacacatcattgcagcacagcaaggacctgaagctcagtgtgcaagaagtgaattttgtatgtttaatgtattttgtcactttatccattttataaaaatgagacctttgcactactgtgagttaacctttgtgatacattttgtaataaagccrggagaaaccagtagaactgtgtgccacacacggcttgctggttgtctgcggcaaactcatgtaagagggttgaaggctgagcctcggaggcaccggcctgtggtgggaacgggacgccccagcaaacactccccagtaaaataaaccttcagtgtaaaatagacatctgagctgtgtgtgagaaaatgtgtgtgcttgaaaagcgaaaacaaaaaacagccagctgtggcacattttgaaaatgaatatttggaaatagtttcattgccgtgtgaaatgtttcagacaactgggtctcctataaagtcatccacagtcacgactctaaaaagcatggaaatgacattttctaacccacttcacatctttccaaatgaaatgtttccatgggttgaacatatactgaaattattatcataaaaatccaagacatcccaccgtgttaaaaatggtgccgagaatcaggcagggaggacaaggcctttgcagagctggtgagcaggaccgggacggagactccacggttaagcagcacagctgacttcctccacccggtccgccgtgtggggcagcttttcagctgcaggagccttaaatcaagtactgagataaccctgcacttccggccaggcctccagtgacctgtagggcaaaatatcaactcagtatcagaaaaaatgatggtgccgtgcagttgggtggctgtccctgaaataatcaccagagtacttttagagagaggaaagttcattaaatcatagagggcgttagtttttagatgttcatttcatcttttcctcatcctctaaaagtgactttgtatcgccgcccccctgggcccattcagtggctttcctggctccggctctccctcggctcagccacaggcatccctcagctctaacgctcccgccgggatgtgctctatgcagtgagggctattcctgacatccccccttccagggaagccccatcactacatcacagcaggccgcatccagattatcctaattagagaattacttgtatcaagtgaatccccaaaccactgtccagggtcgctgtaggagggaccctgctggccttgagctccccaagaagcggcaccactcagcgtttagcttcaaaaggtccccagaggtttcgtgctccatgggtttgtttgttgtttggaaactgttgttaaaataatcgttattaggtgaccccaggaaacttgttgctcaggtgtttgagtctgtcacttaagaggccgagctcgagaagccggcgcgtgggttggggccgctccctgggcgtccgcagagcacgagagtcagcaagccccgcacacacgcctgcaatggtgcagccatcctccccgatccggccccacacacacccctgcaatggtgcagccatcctccccgatccggccccgcacacacccctgcaaccgtgcagccatcctccccgatccggccccacacacatccctgcaacggcacagccatcctccccgatccagccccacacacacccctgcaacagcaaagccagcctccctgatccagccccacacacacccctgcaatggtgcagccatcctccccgatccagccccacacacacccctacaacggcacagccatcctccccgatccagccccacacacatccctgcaacagcacagccagcctccccgatscatacctttctcagggcctcagcagcccccaaggccccgagggacatggcagcctgctctgtgaaacgtcctgtctgttctgcattgtcctgggcctcctcccagcccttcccacaacgcccaggccagctccaacagaggggaagttggccttcaccatccagcgaggcagggtcctggggtcgggcatctttgagccaggggctggggcagtcctgacagctccaccygctcatgccatgccttgcagcctccctgcccgtccgatcgcctgagtcaggcgtggtcctggcctctcttgccccatttgttttttcaaaaacctgcaagcggaatgctgctgcttccgtcttcataggcacagagccggatttaagaagaggaactgtcttcattttgctcaaccacaagggcagtgaccttgggttcaaccctgggcctctctgactgctttcctggccacggctgctctttggccccatgaggagccacgtggacgtgggtgtgccgattgcacagctggagagacgtgggcagacaggctgggactgaaggtttgtcccagagctgagggtggggcagaggcagccacggtatccaggcttctgagcccagcccttgccttcatgtcgggggatgacagtctcgccatcagcagcacccaatgtaggccctgtccagggagtcagtgctgcatcrtcagtgatgggagagggaggcggaggcagggaaatgcacagagccagtggccttggctgctgtgacagcatagcagacggggcggcgcaaaccgcagattcatcgcccaccactcacaggctgggagtccagggtcaatgtgtgggcagggctggtttcttctgaggccctcggagaagaatctgtcccagatctctctcctcggcttgtgggtgccgtctccgtcttcacgcggtgttccctgtggctgccccgtgtccgcatctccgcctttgataaggacccccgtcttgttggattagggcccgccctaatgacctcattgaaacttagccagttacctccacaaagaccctattccccgataaggtcacgtccacaggtactgggcttagggcttggcatgcgaatttggggaactcaattcatcccaaaacacggggagtatctccctcagacctacgggcagtggggcgtggagcatctccgcacgtgtggctcggttgttctacatgatgcaccagttccgccgtggaggaggctcctcggacagttcccttcctgagcgctcagctcttgtctgctccaaggtcaggccctgagaaagtgccccaagaccgtgggcctgggagaaagggtcacggggcttgtgctggattttgggacttttctcttcagcctgtacacaaaggttacacacaaagaagacggcaaagggaggtgggggggtggggagagggccagacagaggcaaacatggttctccagggtttaaagtgggcacggtgcgggatgcttcctccctggctggagaggatccttacctccagtggctctgcgggccgtgcctgttgagaagaaggctctgaagttaccccatgccacaggcctttccgttgcaggcccggctcggccgtcatcatgtgagcgtgagyctctgrgtctccatcttgctcatgcccctcatgactacatgactcctcggaatgcaaggggcagtgtggtgttgccagtgagctgcttctygtttcctaccaggaatcacacatcgcrtccgtgtgagtacaagaaagacccaaatacccatccactgcctgcygatctggaggcggagagaggacggccccagagaccatccaccctccccattcacccayggtccacacagtgatgggaaaccacattccaaaatcaacacttttccaaaacagtgggcagaaaaagctggtggcayggccactccggacgcacatctcagagggtttgctgctggcgcttcagggtccactgtgctagtattttttttttttttttttttgagagacttgctgtgttgccgagctggagtgcagtggtgcgatcttggctcactgcaacctctgcctcctgggttaaagcgattctcctgcctcagcctcccgagtagctgggattacaggcgcccaccaccacacccagctaatttttgtgtttttagtagagacggggtttcaccatgttggccaggatggtctcagcatcttgacctcgtgatccgcccttctcagcctcccaaagtgctgggattacaggcgtgagccaccgcacccggccagtgtattttttaaggaagcaggagaaaacaaaatctgaaaaatataaacacttttattttaaacacacactccttcaccattgaatgtgtttttaagatcaacctatttaaactttcaatttaaaaatggtcgtctgttagagggtaggagacttggcttagaaagcatttgattaaaacatgcagatctccattctcagcttggtcttctgaattttgttaataaaattatttccatggaagtgaacctcattctactttttttagtcaggttatttaatgcttgttttcataattgttttcaacagagatacacaaactgacttttaaaaaaatactgtgccttcaggtgaaagcttatataattgagcagagtttgccaacattttggaacttttttgacaaaataattcccacataaatataactttccttggttctgttggctgagaccctaagtcatttctggcgtattttaaaaatccagactcctcrgcgggcaccgctgcaaacagaccygcctctaaggctgataacgtgaaggtgtcgttttcaacacaaaaggctctgcacagaggktttttcttctgagcgggtggttatttgagtaacacgtcctcttgtcaatctttaggaaaacgggtgttgcccgcagcgaggtgggcggaggcacaagtgagctgrgcccggaagaggctgttttgttcagtggtagggcaggcgcgggagcgctgaggctttgtgcyaaagagaaacagaaaagaaagtttgccatgtgagcgtctcacatcactgtctgccaaattccgcatgtgagagaaggctggaaggaccacactgttacaggagaggctctttgcctccacacggcctgattgctcagggrttttgttagggtttcaaatgtggagagcagaaaacactcaggcacctagagctgggcggtctctgcagagcagggacacaaggtgcccttggcgggtgtgccctggccagtccctccctcgggatatggacaatctccatctcccatactggatccttcaccctttcttacagcggatagggacgctggactgaggcaggttctgtgcccggaacctcagtgatggcaaagtcgctgttccrtgcaccaggagatgacagggaggggcctccrtaggttgggtttcagagactttccatcagactatatttgtattaaagaaagcgcatttttattcatgagccatatttgtatgaatgttcaaatgcctgttatgattattttgagaagttaagggataatttagattctctgctgatattcttgttattatttaaacagtgcatttgctgattaagcattaaccgccactctataggaggcaggaacccaaacagcctcgttaagggactgataaaatgcaccctcgttagagaaccctttttgggggttggtaattatcacagatatttattaggcagaaaggcacaggagcggctggaggctgggtgagtccggtgtgcggggccatgggacagaaggcccagcaggctctgcacggtacctccctcgccgccttttgttcgacagcccgcccattccgctgcttttctcttccacccttcaccccagcaagaactcgctttgctttgggtaaaccaagaatagggaagatctgaaaaatcctaatktgcaaagcatatttcagagatgaccattcgttctcccacatgaagattgtattttacacattgatgtggcacagcattcctgatccygcatgaatttaaagttggtttctcccgtcaactctaccgtggccgcttgtggtgtgaagaagcttccgcctccatgccccagcctgcacctgccctgcaggactcccaggaacctggaatcccaggctattctacaccttttgtctgtcaaggaattggagggtccaggacccaccccctggcctcaaaacagactcatattgtggggagctgaataagttagtctgtggatggtttgagaaaggagaattctggatttggtggatgtgagatggtgcaggactgtctgtgcttctttctcacagcttccttgtggaatatgtagtctgtggtgcacacaccaggccccgggagacctgggatcccttatgcgagcgtgaggcaccccacgtcggaaattcggatacctgggatcccttacgcgagcctgaggcaccccacgtcggaaatggaaattcggagacctgggatcccttacgcgagcctgaggcaccccacgtcggaaattcggagacctgggatcccttacgcgagcctgaggcaccccatgtcggaaattcggagacctgggatcccttatgtgagcctgaggctccgcacttcggaaatttggaatctgaccacatcatgtttctccccagttcctcaaaggcctggaaatgctggtgttgggtggagaggggataacctgagctctgtttgttatgaatgttctcttttcctcccataaaagattttcaagcaaatttkatctggcaatttatttaaaccaaaagcatatgagtagaaagtggtwtaaactgaaataaaaaacgtgtaagatgctccaatccttggaagaccatccctgagggacggggagcctggctatctcatgtcgtccccaggrcacggcacacacgggccccagctgccatcagggccagcggtgaagggtctgtgccgtcttcccctcctccatggtgatcgaaccctaagtttagctaaaataacacgtttggcctcccctgtgcttagatgtggtcactgagtgagacctggccatgagctgtggctgtacagtactctgggcagaaaggcttcttgatgggaaatgacggccacctggatagtggatcctaggctgatgtggttcccgtaaatgtccctggccaggatgcgggacccagactgcccatttagatgggttttgtgtgggagggaagaaaagcctcaggtgttcacaccaaccttgtcagaagttttctgttatatgcagctgaatttagtcctaaacagcacatcttgtcagaacccaggggttggcccagrctggtcactctgagtggcgtggggctgcagcagcatctcgggaagggtacaagcagtcagaggaacggtggctcagggacctgggagaccttctgctgagcttccttgctgaggtgtgaccctgagaggacgcacacccacatgagcctcggccccgtmgtgtctgacatgaatcgcaacttccggatggccccagctcacacactgggaatgacggtggcctcatgctgcctcctccatcccagcctgggggagaaaggcacygcgaactccagctttctgcctcttcggtgggaacagtgggtgtcctcttgctgtgttaaatttgatctgagctgagggaaacccgaagaatcagctccatcaccctggagaccagcgtcagcccggccggtgggaactgagaaggacctgggtgtagaggtgctggggtcctggacgccagccacgctgggaccgaggggctccgcagacgtcatcccaagacccgctattggttcagagcttgtggatcaggaccagagccagtcctctcaytggggcagtgagagcctgacatatgtccagaaggcagcccctgtgatcctcccagggtggcagcggccaagtgagtggtccagggcacaccgtggtgcacacggggcttccctgggtctgggactgcagaggcgtcggggctgctggctgcaccactatagccgtgggctcactgcagggtgcgggccaccattcaggacaagcgttcctgtggacgacctgccagaggtggcagcctgcggacaggggccccactcacttcagctctggcttacagaaccttcatgggatcccgcggaagccgtcatttctgtcaggtggggccccattcactcctggcaagctctgtggcttcattgactggtgggagcattttgttgcctgtaaagccaggaactgttgcccatctcacagcagtggtgcaaatcaaacggaatgagagagggctccgtaaatatcgggcacacatgacagagtgagagagggctctgtaaacattgggcacgcatgatgcagtgagagagggctctgtaaacatcaggcacacatgatgtaatgagagagggctctgtaaacattgggcacayatgatgtaatgaaagagggctctgtaaacatctgtaaacatactgcacccatgagggagtgagagagggctctgtaaacatcaggcacacacgatgtaatgagagagggctctgtaaacatcaggcacacatgatgtaatgaaagagggctctataaacatctgtaaacatacggcacccatgagggagtgagagagggctctgtaaacatcaggcacacacgatgtaatgagagagggctctgtaaacatcaggcacacatgatgtaatgaaagagggctctgtaaacatctgtaaacatacggcacccatgagggagtgagagagggctctgtaaacatcaggcacacacgatgtaatgagagagggctctgtaaacatcaggcacacatgatgtaatgaaagagggctctgtaaacatcgggcatacatgatggagtgagagagggctctgtagacatcgggcacrcatgatgtaatgagagagggctctgtaaacatcgggcacacatgatgtaatgagagagggctctgtagacatcgggcacacatgatggagtgagagagggctctgtagacatcgggcacgcatgatggagtgagagagggctctgtagacatcgggcacgcatgatggagtgagagagggctctgtagacattgggcacacatgatggagtgagagagsgctctgtaaacatctgtaaacatccggcatgcatgacagagtgagagagggctctgtagacatygggcacacatgatggagtgagagagggctctgtagacatcgggcacgcatgatggagtgagagagggctctgtagacatcgggcacgcatgatggagtgagagagggctctgtagacatcgggcacgcatgatggagtgagagagggctctgtagacatcgggcacgcatgatggagtgagagagggctctgtagacatcgggcacgcatgatggagtgagagagggctctgtaracatcrggcacacatgatggagtcagagagggctctgtaaacatcgggcacagaagatgtaatgagagagggctctgtaaacatcggccacacatgatgtagtgagggagggctctgtaaacattggccacacatgaaggagtgagagagggctctgtaaacattgggcacacatgaaggagtgagagagggctctgtaaacatcaggcacacatgatggagtcagagagggctctgtaaacatcgggcacacgtgatggagtgagagagggctctgtcgacatcgggcacgcatgatggagtgagagagggctctgtagatatcgggcacgcatgatggagtgagagagggctctgtagacatcgggcacgcatgatggagtgagagagggctctgtagatatcgggcacgcatgatggagtgagagagggctctgtagacatcgggcacgcatgatggagcgagagaggtctctgtaaacatcagacacacctgcagcacagggatgatgatccatgacacgattttctctcagacagcagcaggcagggtgttggggcagcgcactcagggcagtgacaaactggtgcctgttccccctccgttccggccccaaaattgtggggacgccccacagcagctcagtatcacccaggggaggggaaagggtgtttctcggtggttggttcagagctttgcatttttagagcgtcatttcctggaggcctgagagatttcataatgataccgagttctctcaatacgtctctgaaggagaaacggactgttcttaggttcatagaatcaagcagctcttggttttccagatgggtttttttacctctttaatttcctaggatgcaaacgtacatcacaccttggccagttttcagaagacttgttttggtgactcccacccccgcttttcttcctagaatattggcggctcatcttcattgcctggctggacgcagacccagccctttcatctgacagaggtgccgtgaatctcgcttcctggcgsgtggctcacccccaccttttcccactttttaatagtgtttcttgaagcacagaagctgcttcacttgatttgatcaaattttaccactcccttcctccgtagtttgtgttgtttgaggaaaggatttgaggaaactgttttctgccctgagttcagagaggctcaaatgttttcttcaaaacatttacaggttttttccccccatttaggctttaatctgcctggggttaatttttgtgttttgtggagagccgggatccacttctgtcttccgtccctccccatggccccacgttgcttgtccttcctctgcccatggccctgctgtgtccttgctgccgtccccgtctctgtgagtcatgagcacagggacctctctggggcctcagctccatgttggtttctttcctgtgcacccacctgccccgcggggaggttctgtgccgcacagtgggttaccgcatctgcaagtggctcctccatgcaatgctccttaacattgcctgggctgttcttggccctgtgtggccgggaacgtggtgagttaggctgcatggttcaccgggatgtggccgggaacatgctgagttaggctgcgtggttcaccagggtgtggtcgggaacatggtgagttaggctgtgtggttcactggggtatggccgggaacatggtgagttaggccagtaacctggtgagttaggctgcgtgattcactgtggcgtggccgggaacatggtgagttaggctgcgtgattcaccagggaaaagagggcggatcactctgtgtatgtcctctgggtggtgcagggaggacagaaaggccatcragtatctgccatgcatttttttcctacagctggctaagggtgctagtgtattcattacattagcctgtgtatctttttctaggaataaaatagtccatttgaaaaacaacaaaggcagccatccaagttgctctctgcccgtcgtggaccaacgtgaggtcagggctgcgtccctgtgaccttgtgctcacctctccctttgtctatctctacaccaagggcaaaccctggaagataaggcaggtgtcaccaggtggatcccaaccgatctgtagggtttgctggaaaaccagtgtccagggctccagggcatcttcccacaggccagaataagaaaaacgcccctgaaataacaaaacaaaagagacaaaggccgtcacagtgcacggacacgagcacccggaggctcacaggactctgcggtagacagaacaccacagatgctaacatactgctatctcgtcagatgcaggcagcgcccagctcacccctgcggagccgctgacctgcaccagtcctgagaactcagtgccgggtacgttgccgggaacacagagcaacttaggacgtgaacaagcctctcgtactagaagtggaggagtaataatgctttcttcatctccagcagtgtgccctcatcaccaccctggggtcgtgctgtggaaggccttctctttctagagcattgcttcaggaccccaggctggtcacgctgggctcctgtccccgtgtcagcctcaccctctcctcctggccctcacctggcagtttcctcagtggctttgggtcgttcctctgccccagatgtccggtttcttcctcgaatttcagctctagtgttctttcttctccccactgtcctccatctcccacacgccagtggcctcgctagctgtgcccaggccttcagctgcctggagggtgcaggctggggatggggctggggcctggacggcttctacagagaagtgggaatgtagaatctccttcagagagygtgtggccgtctcaccacccgccaaggccagtccctcctgttccctttcctgcagagacacgtgctgcacaccacctcctgtgtgtggggcttgcacactcctatgttcaaaaggcctgcgttccacacccacgacgtggaggggcctgcattccacacccacgatgtggaggggcctgcgttccacatccacgacgtggaggggcctgcgttccacacccacgacgtggaggggcctgcgccgccccctcctccgtgcagggggtcagagtctttctctgcacctttcctctccgtggaagagctcccggtgcctgcagtggggtggcactggtgacggcaccacatcgaaaggaccccaatgtggagccctgtttgctccagttgtctggaaggaatgccatgcagccccgacctgttcctcctcccctttctatcagcaaattaacatcccacgcattaagccttggtcctggaataatcagcacagagcagaggtttccttcgaaactgcgagtgtgaatcatagaaccgtaagtatcatgatattgtgtggcacgctggaaagaaagcaagagagttgcgtaggttaatgtgtgttcccaaatttttttccgacacctgcactcaatgagcggctctgggccttctgtgtttttctgcaccagccgtctctccacctgccctcccccagggaatcccgacagtcagtggccggggaagttgggtctggaaggaggggacctcttgacttctccaggggaggctcagaggcacagtcctttgctgaggagctccaggtggaggaaggcagagaacgcacagccaggcagtgggcatggactgaaaccagcccataaacccccacgccggcccccctaccaccacaattaattcattaatgctggaaaccaccattgcattgttttcttgtaattatacacacctcaaatgcttgcttttgaagacattaattgcatgattagttttatgatttctgattaccaattaggttacctttttgtgtatttcatacataccattaggctttatggtacagcttttgtaatttctcacctagcaggggttctcacacatttgaaggctacattatccactcaataaacagagagagtttaattttctgtgtaaagtattggtgtggacttgggaagatgatgtttcagatattatgctatcaagagtgacatttaattttacaggggaaaagtcgtggttttcactgtcataacgatgttcacagagcatgactttagagatgggaggaggccgggtccaatggatctgtgtctgcggtgtggattgggctgtcacatcccttctctgaggaagatattcctaatcactctaccctttactccgacttgttaatatatttaatttacttgtgccttgcctctttcccaagaatagttagaaagcatttggtgctgttgggtttcctatgtgaagttccttggagattccattccctctgatctgaaatcaaagggctgggtgtgcactgtggcggagacaggggcacaggattcttaacgtgcccttgtgaggccagatgagaaagtaatcccagcactttgggaggctgaggtgggcgaatcacagggtctggagttcgaaaccagcctgaccgacatggtgaaaccccatctctactaaaaatacaaaaattagctgggcatggtggtgcctgcctgtaattccagctactcaggaggttgaggcaggagaatcacttgaatacgggaggtggaggttgcggtgagccaagatcatgccactgcactccagcctgggtgacagagcgagacaccgtctcaaaaaaaaaaaaaaaaaaaaagtctcctgaatctgcacacaaagcggcatttgagccccttttgtaccatttgcactttaaatctcctcccttcccccagggaaaataagagcagatagatcagtaatcaagagatggtcaggtggacgaggcggctgattggagcgcgctgaaatgaccccataaagcaggaatgtgtggaggaggcctggtttgaccatgtgatgcagcagcaccgattcacagccccacgcacaaaggggccagcaaataatgccgtttctaatgttgtgtatgggttggggaccttcctgttatttaaaatggatgcatggttccagtgctctgacagccaggcctccccgaaagggaagccactgggaggtctaagatactttcaattggatgtggctatagaaagagaaagttccaattttgatgttgatccttaaagtattagcttgacaaagctttgcattatgggggagagaaagggagaggagggaggaaaaaagacacagtccccggggtactgtatgctgtcctgtgggcccctgcaggctgcaggcccgcaggaaggaaagcgcagaatccagggtgttctcctgataaccagagaggacgtccccagcaccccgaacgctgcaatattttcataaatgtagaaaaaatagtagtgtttctcaagcaacctttatttacccccagctttgcttctctttctatggaaggcttccttattgtcccacgtgctcctgaataatgcatgagcctcagagtccgccaggccaggaagcacaaaggccccgtggtgggggcccttccaggcaggcaccccagcagcctcgggtaattactggcccttaatgggcagtttccctgcctcagatagatttgtgtgtgtgtttaagactaatttagggttcctttgggggagcttttcaaaatcatcacctgcgggtggggtgggaaggggaggatccttcactcaagtttcacttaaagccacgtacaatacggtaagtttgaaaaaccatcaggaaaaggaaggccgacctgttagtgagcatttgagcttcccaccatgtggggctctgcactttagataatgtcctcgttcacagttttgtctcttcaccgatgttcagccagtgacagggagcgtgtggggagtgaaggcggtgaagaagctttcaagaccccatagcctgttccaaaaacagcctgaattaacttaaagctgcccttgctgccatcgtggccagcgcatgaactgttactgcagaaggactttcacagaacttaaaagtagatcatgcagctctgcgaccgcctctgccctgtgctgggagcgagtgcagggcggacacggctggcacttccagcagaaggcactgcagagctcccaggccaggcagcggccgttgtgaattgcaggttgccctgcagactggacgttgagagaggaggagggggcaggcaggcggtgaggtggtggctccagcccccgccggtgcttctccctgggcactgcctgagagggcgcccagcccctcacctctccaagaagaaacacttctggctcctggaggggtctgaggacggggctcctcttcaggggtcctgtggcctgagaccaggaagaaacaacctgtccccctgactgctgagcagcagcaacccactgggtgaaaacgctggaggctctggatgctgcctggtggcggctgtgagtgatcaggtgccagcgtcagcatcgggtcatccactgtccagaatccagcaccactccctaaattccaacttccccccaacacggggcctgctctgtgggcttcagccggctcggatgttgtctgcagctcccgtcccgtaccctctccactcccacaccctgcctggacatggttacacagtcacacacactccacacagtcacacagtcacacagtcacacgtggccacacagtcacacgcggtcacacagtcacacgcggtcacacagtcacacacagtcacacagtcacacacggtcacacagtcacacgcggtcacacagtcacacgcggccacacagtcacacgcggccacacgtcacacgcggtcacacagtcacacgtggccacacagtcacacagtcacacggtcacacagtcacacgcggccacacagtcacacgcggttacacagtcacacacagtcacacagtcacacgtggccacacagtcacacgcggtcacagtcacacacggtcacacagtcacacagggccacacagtcacatgtggtaacagtgacggccacacagtcacagtcacacagtcacgcggtcacacagtcacatatggccacacaatcacacatagttacacagtcacacacactccatgtggtcacacagtcacacacagtcacacagtcacacacagtcacacacggccacacagtcaaatgtggtcacacagtcacacgtggccacacagtcacacgcagtcacacacagtcacacagtcacatatggccacacagtcacacatggttacacagtcacacacactccacacggtcacacagtcacacacagtcacacagtcacacgtggccacacagtcacacctggtcacacagtcacatatggccacacagccacacatggttacatagtcacgcacacagccacacacacttcacacagccacacagtcacacagtcacacagacatgcactcccacacagttgcacatacacattccacacagctacacagtcacacacactacacatagccacacagtcatacacagacacattcccacacaggcccttgcactccacatagccacatgctcacacagtcacacacacaatctctcacacacacacagacacacagagtaatacaaagtcacacacacagacagacacatagacacagccacacatgcacattcacatacactcccacacagtcacacaaccacacacacagccagacacacacacagtctctctcacaaacacaaacacacgccacacacactccaccacatacacactcccacacagccacacagacacacacagtcatacactcacatgcagccacacatatggacacagtgacacactgacagtgatgaacatgcactcacagtcatgcacatacattcaaacacactcagatacacatacgactatacatgcttcagtcaactcacacagtcagataccaattcagtaaagaacaattacgtgttaatctgtcttgtgccaaatataagtcattggcttttagaggatggaatcagaggcaacttcacgaagacaagaacactgtagccaccccagggaagacgagaggaactggagtagccacggcggagaggagctttctcccgtgccatccactacgagaggaactggagtagccacggtggagaggagctttctcccatgccatccactacgagaggaactggagtagccacagtggagaggagctttctcccgtgccatccactacgagaggaactggagtagccacggcggagaggagctttctcccgtgccatccactacgagaggaactggagtagccacggcggagaggagctttctcccgtgccatccactacgagaggaactggagtagccacggcggagaggagctttctcccgtgccatccactacgagaggaactggagtagccacggcggagaggagctttctcccgtgccatccactacgagaggaactggagtagccacggcggagaggagctttctcccgtgccatccactacgagaggaactggagtagccacggtggagaggagctttctcccatgccatccactatgagaggaactggagtagccacggtggagaggagctttctcccgtgccatccactatgagaggaactggagtagccacggtggagaggagctttctcccgtgccatccactatgagaggaactggagtagccacggtggagaggagctttctcccgtgccatccactatgagaggaactggagtagccacggcagagagcagctttctcccatgccatccactacgagaggaactggagtaggcacggcggagaggagctttctcccatgccatccactacgagaggaactggaataggtacggcggagaggagctttctcccgtgccatccactatgagaggaactggagtaggcatagtggagaggagctttctcccgtaccatccactatgagaggaactggagtaggcatagtggagaggagctttctcccgtgccatccactatgagaggaactggagtaggcatagtggagaggagctttctcccgtaccatccactatgagaggaactggagtaggcacggcggagaggagctttctcccgtgccatccactacgagaggaactggagtaggcatagtggagaggagctttctcccgtgccatccactgtgagaggaactggagtagccacggtggagaggagctttctcccttgccatccactcagcaagtgtcggactccactgagtcacttgtgtgtcctatgctgggcagcagggctgtgagatccacgggacccacccctgagtccaaggctccgtgtctaacaggtgcaacagacgtgtggcggcaacaaggaagggtcatggagtgaaggaggatgtgagtcctgccctgtggaggctggatacactgtgtccttgtgagggtcatggaggatgtgagccctgccctgcgggggctggatgcaccgtgtccttgcagacggcaggagtgcgaaggactcaggcacagagcaagagggcatgacccagcagaggctgtcaagcccagggtgttcctgggtgcgtgtgctggggagtcgacctccacagaatgtggtacatggccctggctcctcatggtgccccttctgagccatctcggatgactctgcatcaaaacagcctcccccctccaccacctcttccatcagacactacatcccccatgggcattaataatgtcctagccgtccataaacctcagagcctggcccacagcacacaacaagcgagcaattctctgggtgggtgggtagatggagggacgtgtcgatgggcaggtgggtggacaggtggtggtgagtggatgggtgggtggatgggtggagggacacatggaagggtggatgtgtggatgggtgggcaggtggacaggtggtagtgagtggatgggtgggtggatgggtgggtggatggagggacacacggaagggcggatgtgtggatgggtgggcaggtggacaggtggtggtgagtggataggtgggtggatgggtgggtggatggagggacacatggaagggcagatgtgtggatgggtgggtgggtggacaggtggtggtgggtggatgggtgggtggatggagggatgcatggaagggcagacgtgtggacaggtggtggtgagtggacaggtggtggtgagtggataggtggtggtgagtgcagggtgggtgggtagatggatgagtaagtgggtggtttggtcgggggatggatggatggatggatggatgaatggacacacagttgtagatttggtgacacaatttggaagtctctggagcaattaaaaatggtccaggccaggacatggtcatgacataggccaaacctcttctatattatctgtcaggaaatcatatttttgttaaaatacttgttttgtgtctattgaacacttagcgtggaaaacttagaaaatgcttactatttgatattcttttaggatgtgtgtgtgtgtgtgtgtgtgkctttattttgcttttcagtttgtatgtgtgccttatcaaattgtctttaaaatatgcttctgaggaacactttggtctttatgtggttctgctgtaagttcttcaacccatgtgctattgttgaacatttagcttgtttctagtatttcattatcataagtcttgctgcaattaatatccttgggcatacattcaatctatgtggcttactgtttctttaggatacactcctagaaatctaactactatgtgaaatggtgcaagctcttctaaatacctcaattcctcttatccagttgaactaatatctccaacaaatgcaggtgcatctggcaagtccaataaacctgccatcatccactcacttaacaccaagggttaggacttcatttaagtgcatgcaattatttagggcaaacgatagcatcttatcattggtttaatttatagtttttgatttattgtagatttaaacattttatcatacttgattattgatggttctgcttcctgggataatctcttcatgaattttcctatgggagtgtgaattttctgaaatagactcacgagtactcttcatatttgtttttgcctcttacttttggccaatgttctgccaggcttgtctgtgtctaacgttgcttgttgtactgtctgaagttcagaaaggctgagctctggtggattcaaatgcacagtcgtttcctttaagattttgtcaatcgctctcatgtttagaaagtgcttgctcatcctgtcatcagtgaaacacaagtttttatttgttatttttatggttccattaatgtgttaatgtatctggatcatttctggtggttgtaatgtgtgtgaagtgagggataaactaggaccttcccccaagtaaactctagtttcttgaataagccattgtttcccacgcatttgcagtgcacccttcggctatgttgttaatttcgcccctgcaccctcccgagcgccctgagagccgaggcattgctgcagatccctgtttcctgttcttcctactagtcattctagcttcttcttgcaaactctcccccatccttaggacgagtctctttcctgtgccgtacgtctctaatatcccctcttttagcatcttttgtgctttgctcgtgattctcgaagagctttgcgggttcggttgtgaactgtagtcagttctgctctgccgcctcaatgtgaattttaactctgctattgtagttttaatttcctcacagttatttctcatctctcccagttccagctctttgccttcataacttggtaacggttctgtttttatgacaccctgtttttcccgttgtgttgtgtgtttctgctcctgtttttagagaggctgtgtgtcttgcatcttcgttggaaagggtagcagagttctcttccagccaccttaggaaatcctcctggaaggtctgcttgtcctagggggctcaggacgctgtggcctgtctcttactgaaaccatattttcagctgtccctggttgctggcttttatcttccctcttcactcattctcaaaggaagagaagagaaatctatccagcttcttttcctgacaaaaggcaagaagtagctcatcactgccccagctccattcaccacccacagcaggctacatgcattctttccccagatctgtggctcggggagtaggcggacaggtcaatgttcacagctgcaggaaaatccctggttttgctaagagaagcattgaaagctgggtccggtgctcttattgacaacacatttggggttcatgacaacaagccccgtagcctcatgtgcgtctgtcctcctaaggtgggtccccacacccgcctggggtcctccctgcaggccggctccaggctcactggaggctgggcccgcagccccgtggcttcccctctgcgagcgtgcactctgcacacacaagcacacccacgtttctgtctggagccgcccgctcgccctgacttccctgtgagcgcagctgcgctgggtgcccctggtagccagcgggtgggtcgactgatcaattgatggattgatcacagggagtgcttctggctcactgattggtgggtggaattgatggattgatcacagggagtgctgctggctcactgattggtgggtggaattgatggattgatcacagggagtgctgctggctcactgattggtgggtggaattgatggattgatcacagggagtgctgctggctcactgattggtgggtggaattgatggattgatcacagggagtgctgctggctcactggtgggtggaattgatggattgatcacagggagtgctgctggctcactgattggtgggtggaattgatggattgatctcagggagtgctgctggctcactgattggtgggtggaattgatggattgatcacagggagtgctgctggctcactgattggtgggtggaattgatggattgatcacagggagtgctgctggctcactgattggtgggtggaattgatggattgatcacagggaatgctgctggctcattgattggcggatagaaagtactacagagagtttcgaaggacgttggcagaggagaaatccgccagctccttctttcggcaccaggtcagagagaatctggggctgcagtgttggtttctgggttcagtgcgcctcagcccagtgaggagtggagaccaacagcgccagctgcccacgtcctgtccgattcgactcagaaagccacaatgctgatttatggaaatgagcggcttgttactcctaaaatgtccatggatgagagttgtgaccagaagaaatgcaaaatattgaaatttatctggaaggaaattgaagcagcggataagatcatcatactaacggctgcatctccacaccctccccaatttcctaaaacccaggagagctgctcccggaactatgctccatcaagtttaccatcatacaggatggatgggctccggccacgtcacacacttcctgaacgagtttacaatcatatgggatagatgggcaccggccacatctcgctcctggacaaattcaccgtcatacaggatggatgggcgccggccacgtcgcatacttcctggacgagtttaccatcatatgggatggatgggcaccggccacatctcgctcctggacaagttcaccatcatacaggatggatgggcgccccccacgtcacacacttcctggacgagtttaccatcatatgggatggatgggcaccagccacatctcgctcctggacgagttcaccgtcatacaggatggatgggcaccggccacatcacacacttcctggacgagtttacaatcatatgggatagatgggcaccggccacatctcgctcctggataagttcaccatcatacaggatggatgggcgctggccacgtcgcatacttcctgaacgagtttacgatcatatgggatggatgggcaccagccacatctcgctcctggacaagttcaccgtcatacaggatggatgggcaccggccacatcacacacttcctggacgagtttaccatcatacaggatggatgggcaccggccacatctcgctcctggacgagtttatcatcatacaggatggatgggcaccagccacatcacgcacctcctggagaatcccgccatctcatcacagttctttgaccagttggctattttctccattgagtaaattggtttggtaacttttcccactgtccccattctgatcacaaatccagtcactctctgctgttgcttttgctactagaaggaagagaactgctccatatactgaaatattttgggccaagccttccagtaactgaagatccattcagcctttgaatcaaccccagattcccacgcgaagcatatgtgtttggaaactgtgacagattgtgcctttccttccttctcaccctcacctcccccacacgtgcagctccttcgtgtttccatttctttttttctttttaacagcaatttttgtggcatctagaagcaagtgcagtaagtctctgggtttgaagggagcttcagtgtgttggtcagtcaggcaaagcgtgggtgaaacttaggaatcctgtgtttctctttgaactcaacagaaccgctacatttcttgacttccaccttcccaaatgtatgtttaaaacaaaaacaaaagtattctgtctccagtttacaaaggcaaccttcctgaacagaccaacatggattagtgccgcctgtcggaggagccacttggcaatgtgtgagcgcagccacagcacacggtaatttgcagaatgcagccgcctctgatcggtctgaaataatcctcctgtttatgaaacagagcctgagatgcagcatcgagcctggtgccaatcacagtggtagtgcggcttaacacagagctcgagtcctgagcctgtgagaccggctgagcagctgccacagccttggtgccacctctcatgtcctccgagcttccgggcgctgctgaagaattcatcacatggttgtgcaagtgcctccaccccggagaattagcggaggtgccaggtgctccgggaggacccctcagggccatcagcagcccagccgtcactcctcatgcagacgaagcaactgccagacaaacttctttccgttttccaacaacttaccccgctctggagctccataactgccctcccccagcttaaggatggctatgaattaaaccctggaatatccatatattttatggcctagggttccattcgtgggacgtctcgtgagggtctaacgtggccaggcttgtcataggactgggctgtgctggtgtgaggacagccccagctgcctgggggagggagacggcagcctataccttccctgcttctcgcaggcccgaagtagaggggagctcagtgcagaacacctgtgtagactcccaataagggttggatgtcttcctgctcgttctgacaggtggagatggctctgaaatgctcactgagaccctcccagccactcctctgctcctcctcttccctgcctcaccctgctcagtactgcagggtgagaggggccgtggacagggatggggagggcagctccgtctcccagccccagccccagggcaactccaaatgcacccagccctgccctgctcttccctggacacagaacccgcatcagttaagatgcttcgggaagaaataacagaaaaccccaacgagagaaggcttagactacaggatattcacggctgcacatggcgggacacctggaggaggagtggccgcagtgctggatgaggctacaggtcgctgggacaggcctgcaccatgggggcttctgtctctggacttccctgcaccccttgtaagatgctgcagggcccgagcagttcctccccacagctgggctcacagcaaggagtccctcttcctgtgcttctccctttatcccagaattttattttgcaaactccacactgtcaaacaagttgaaagaagagtaaaatgagcacctgcaccctcttcctccagagtcaccaactttgagctctcagtcatgcctgcaactctgtcatttacctgtgtgtctggatggaagtcacaaaggttgctgcagacatcacaaaacttccccgtgaggtgcagaaaagggagtgtctgcatcatcccccagcgtgcagcctggaagcagtgacgttacttagcacacgttcgtatgtggccagttttcccgttgtcccaatagcttgctttttatttttaatccagattccaatcaagggtgaatgctgtgttttgttgtgacatctcggattttctttgttctagaatacttctacctttacgttttagttttggtcttttctagcattgcaattgttagagaaaccaggcttgtcctgtgggatatcctgtggcctgggcctgttggattgccccacactactagattcagatgcaggtcttcagcatgtggtgatgtgtgtgcctccggcagctgtgggtgcacggtcagcccctccccgcgtggcgatgtgtgtgcctccggccacagcaggtgcacggtcaacccctccccgcgtggtgatgtgtgtgcctccagccacagcgggtgcacggccagcccctccctgctgggacaatgccaagtgcagtcgctttggtaaaagaggcacctgccacatcactccattgtaaaggtaaattcttcccttggtaattcatcgttgatttgcaggatgataccttgagaacttaggggtatcttgttaccagcagccttttaccatgtgcctctttttaagggctgagtagggaagaagggtgggctggatgcccctgagtctgaggatgaggactgtgaattcagggaccccagatgcccctgggggtgctcagctgccagtgagcaggcacagagaagccagcccctcctttcttccagggttggcacttcccatgggaccaagagcaggaagacaggaggtcaaggacaccatccagaaaggacagtgggagggagggtggggcaggagggggtggtaacacgggggagagaggatactgcagaccaggagttctggtgaccaggacacaatgtctttggaagcatggagggacagtgcagctagaagcacggcccacagacaggtggagctgccactgcagaggtgcagggcaggcagctgccatggggcagaggagacatcaccatcatgagattcagggtgaaacagagtttgcccagggacaaacgtgttgccgccaagtcaacatctgtaccatcatgcctgaggagtcgggccagggcttttcctggagcgaccttcaatgcggctgctctcccggccctctggacggggtggtgctggggcagccacttgggctctcagcaggtgggtgcacggtcatgctctgtccttccattgcagagatggctcagctcacagtgtggcgccttccgcctttgtaaggagtcttcaccaacatcctcgtcctcagcttttccgtgtcagtcttgctggagcctctagaaagcagaggctttcacgccgtttagcatcacctacgctttaatgacagccttgtccagactttcaaacttacctaaccccacgtatggcctgcggtgcacacgggcccgcatctgtggcctcacggtcagggtgaccccacaaaaagagcgccccagatgaggacctgtttgatgttcgtcttttttaaggacttctacttaccagccgagtgtttgatcagtggcgaggcctcatctcttttgcgccaccgtgttcagatagcacctgccccaacactcgcagcaagacgggacccttgcctttttgtttttgactttaaatagctcctcattgtagaagacagtttattatggactcttcaaaatacatttctagggaaacaaatttagttgtccttattaaaaatgtattacatatttcagaatcaaagctcacggctcacgagcatccygcgccmggctgcgccccgcgctggcatcgcagacgtgtcctggaaggaagaactccaagtgcatttgaaattcaaattgtgtttggttttaagatggggatgtcatcaatttcccttagaaaattataaaaaccatgatgcataaagaaatacagttggagaaaacagtgacaccatcttcgttcctgaattggtgactccaaacggcttgcccttggaggtcacttttatagggggttaygcaaataaaactgagtggcgttgttaaaattctccactactggacctttttagccaaagtgggcatttcgggagtcggcaacacagacagaccctgtcttacttgtcagctgtttggcaggaagttggtactttgccatagatttcagtttacctggttttgttgaatgtctcataaacagatacttgatttgactgtttgtacctgcagtaaccaggacatctctcagggtcttgctgtgatcatacctgcagtaaccaggacatctctcagggtcttgctgtgatcatacctgcagtaaccaggacgtctctcagggtcttgctgtgagctgctgccactttccagactcttccttcaccatatagtcttggtgctgatgacacggatggctctggggcagggaagtggtcccgaggggcacagctgtgggtgccgagggcttgcggaagtgggggcaagtcttgtatccgatcrctgttccgtccatgggctctgtagtcaacgtggcctcttctgtggttgctcgtgaagacacagctcagcatctacagtctgtagcaaggtggacagtctgtctacagcctacagcaggggcatccggacaggttggaaaagggagactgtggtgaccacacgcgtggaaggggctcagagaagcatgaggacctcccaccatcttcctctgagtaagacgtgatgctgaattttaacccagaggctggtcccagctccatctgcatgtggggaaaattaatgtcaggaaggaggaaaaccagaacttacgaaatgtacttccgtggccgtgaaggcaggcaggtcccacggtggggacgcccagagctgcaccccaagctgccgtctgagggaccctccagggcagctgccttgcggagacctgtcagcccaactgtgtcctggggcttcaagcattttctttatgtttaccttttcaaaaaaaaacaaaatcagaacgtgcagcccgaggaaggcactgagactctgggaacagcccgtgacacggtggccgtccctgagtcaaagcatcacagccggcgagggcggggccggcagctcaggggccacatccaccccggcacggtgagtcgtagtggagacaccaccaaccgccctcctccaaggcaccccagcacctggtcctcagtcctcgctcaaggaacatctgcagagcacactgggttcccccaaatgccggaggggtcctttgtggacgcagtgcccactccctgggccactgggtttgaaggacaactcagcccccatgggggaaataagtgaattgaatggaggacgtcacgcctcactggaggtcttaggtccaacccccaccacccacacagcccgaacgctttctcaggcccccagacagtgcccagggacattctgatcgagcttggcctccagacagccacggcccacactgtgttgtgttgtgttgtgttgtgttgtgttgtgttgtgttgtgttgtggtctctggcttccttcatccataaatgggtgcccacctctcaaaaccgctgcaggaatcgaatgagataatatgagggctcaagatgaaaacccaaatgcagggtgttgtcgaaaagctctagagaatggaaactccagaaaaccacaagggcctttgatgcttcatgagtttgaaaacaatgtttatacaggagttagggttaggttttggatgacattcagttagaaaaactcatagccagtctgcttggttagaaaatatagtaacttcagatgtctggcagtgttgtgttaggaccagagaacctagtgttttgaccaaggaagcatcatctctagtgcaatgtgtctgctggggacacggtcggagatgcaggacaacttgaagacatttggagggtcctgtgcaggagccgggtcagtatagacccctctggtgcctgtgggataagtcgtgctcctgggcagatgaattcgctgccccgtgcgcaggatatatgggcgcctttcctggctccccattgccccatgacctcacaggaggacggtgacatcctaaagccatgttctgcccaccctctgggatgccatggtccccaccctctgcaatcaggactcccacttgctcctgtgacacccccaagtccccgccaggctccgctgagattaccagggccctcacctgtgaactgggaagagtaatgcccaccttgttgcctggcgtgagggtgaaatacagcttagcacagcacgcgtggaaatggcgctcacgattgtgacgatcgtgttcgtgctgccatctttgcacagcacgcgtggaaatggcgctcgcgattgtgacgatcgtgttcgtgctgccgtctttgcacagcacgcgtggaaatggcgctcgcgattgtgacgatcgtgttcgtgctgccgtctttgcacagcacgcgtggaaatggcgctcgcgattgtgacgatcgtgttcgtgctgccgtctttgcacagcacgcgtggaaatggcgctcgcgattgtgacgatcgtgttcgtgctgccgtctttgcacagcacgcgtggaaatggcgctcgttgtgatgattgtggtcatcacagttgtgttgtcatctcagcacagcacgcgtggaaatggcgctcattgtgatgactgtggtgatcacggttgtgctgccgttctatttactggtggtggcttgagcagaggggattgcctgaccccttacatgcacgggggaacaaagtgaaagtggtgaataaagcacttgcgcttctccaaagccttgactcagtgtacaaaagagcatctgtaacttttcaagcacccctaagccacagacatccagaagctctctacagtgatgctactttttgtctcctggagccttgaggtctccagaacagtgcctgggagctcggcagagaagctgagtggtggaagctgaatggggctggggccagcgctgctgctcccccgggatccagccaggttttctcagatctgcagagaaggcgcctgaggtctgcctcgagagagatacctgtgtgagccccaggtgtgaactcagacatgaacaaatgtggagggcagtggtccaggcagcagagctcactcgtcctcttaacacgggagccttcattgttcaaaggtgtgattcatacactgacgtggcattttgacacttttgagaggataatctgttcactggcaaacacgtgtgtattagtcaggattagtgtgactgagtgtgacagaaaataaaaaataaaagtggcttaaatgagctggaaatgcactttcatttcctgtggaagaagtctgggggggaggcagtctgaggaccttgcagcctctgaggtcccagaaacaaggtgttctactcctgccgctccagccctcagccctgagctgctcctcatgatcccagatggctgctggagatcccaccatccaggtctcatttcagccagcaggaagggggaagaagaggagcagggcgcgcgtcccaccatgagacactccctgaaagcagcacacaactctcacttgggttgccttggccagaaccgagtcgcatgtccagcttcaagaaaggctgggaaagagaaacttcatccacgtgtccagctacagaccagaggctccaaggaagcagaggaagaccagcaggcctgggatggtgaagaatcctcgtttgccctgagccaagctgccttgagatggggtggggtctgcagggtccttggggccacattggctgactccccaggccctcagttttcccagcatgactcagccctaatgtgggccctgggtgccgctcgtgatccgcctgctttgtggcttcattcagcatgtggaagtggttccatcatctgctccagccaaggcgaggcgggttctgcctcacgggaaacaggtcaccctttctctgaggagtgttgccttctgcccaagtatttggggcacagcactagttgggggtcactgcagtgtagcatccaggttcacacccaaagactcttctgcccaccaacagacagccagtgacccaaaagcatgcctgtcctctagaacttcctgtcgagccaggtctcaccatgtccctccggaatggggcagcctccattccctattttgcgggaggctcagttgccaacagtccagagttcctaccgagttcttccgggggcctgtgtggcagccttgagtcagcaaagagtccctgagtgtcagtgacacacctcacgccatgcaggcacagagaatccacggacagcatgcacttgtcctcgggaagctgctgcccattggacaggtggggcaccagacagaggcctcccatccttaacatcccaagacaaacctgctaattaaggcttcaggtgcaaaggggaaggccctcttgtggttctctggcagcggtcggcacaacaagctcgccccctgccctaggaggaggacctgtggtcagcttctaccttcaggagggtgactctctggcagccgtcggcaagctgagctcgcccctgccttgggaggaggacttgtggtcagctcctaccttcaggagggtcacaggaggctgtgcacaaaccccactgacggtctgagctctggggccgtgtgctctcgctgggttcagggggattgttactgatggcagagcgaaggtgacttgagatgcatcagttctctatgagggcttgaagtccaggccacttttgagccagtccatctgctcatctctagagtaaggaggaaaaaggaaaaaacacttctaatttctctgtctgtctcatacccagctgtggaacgaaggactgattcaacctcctccccactttgccctccagattccccttagagacacaggctggttagggtatctgaattatttgagcaaaattttcatgcttagggaaaagcttgatgtgatcaaaacctaagtctcaggacatcaaatccccagatgtttaaggtagactatatatatcaagcctttgaagagttcaaaggaatgctagccaatgagtgagaaaatctgaaaacttcaccagtccttgcctgtcatatgaacttgatgatctaacctgtagtcttggatgtcaggggcctcagaaacacaacttccaaaccagaacatccttgggggatgaagacaacagggatcctaggagtccaattctagtctctccattctggatatctccacatcaagaatgaataatagatggagtccagctgttttgtagcagactgcagattagtgattcactgattgtaatcagaagcagctgctcataatcacagcccaggtacggacgctcattgtcaagtactaggtgttaattttttgcctataccctgagcctgaggctaggagtgtcttgaagctaatgataacataatcttgcaaacattaattagaatttcttgaacttattctaataatttgttattttgccaggctttagtattttaggtatttatgtgttttaaggttttattaaatattttaggtgattattagctctattttttaacaatatgggtcctcaatagaaatctggatggatggatggatggatatatgcttccataggtagatggacagaatggatggaaggaaggatagatggatgcatgcatggatggatgatggatagtgggtgaatggatgagtggatagaaggatggaaggatagaaagatggatgggtgcatgtatgtctgtatggatcatgggtggatggatgaatgcttgatagtggatgaatacatggataagtgatggatagtatatagataaatggatggatgagtggatggatggatgacagattggctgatggatgagaggaaggatggatgcctgcatggatgatgggtggatggatagatggatagtggatggatataaggatggatggatggatgggctgatggatatataggaggaaggatggatgcatgtacgcatggatgatgggatatgtggatgggtagatggatagtggatgggtggatagaagagtggatggatagataatggatagtgtgtagatggatgcatggtgagtggatgggtagatgaatggatggatgaaagggtagatggatgatggatagtggatgattggatgaatggataagtgtattatggaaagataatggatagcggatgattggatggatggataagtgtattatggatagataatggctaatatataggtggatggatgatggatagcatatagatgggtggatgagtggatagatggatgatggatagtatatagatggatagatgagtggatggatagttaatggatagtatatagatggatagatgagtaggtggatggatagtgtatagatggatggacggatggatggatggatgagtgggaggatggctcatggatagcagatgggtggatggatgcatgagtgtattatggatggatgatggatagtgggtgagtggatggatggatgagtgtatagatggataatggatcgtatatagatggatggatgagtatttggatggatgatggatagtgtatagatggatgaatggatgagtgggtagatgaatgcacaatggatagtggatgagtggatggatgagtgtatgggtgattgatggatagtatatagatggatggatgagtgaatggatggttattggatggtgtatagatagagggagggatggatagatgagtagatggatggatgatggatagtgtacagatggatggatgggtggatgagtgggtgtatggatgatggatagtgtatatatagatggatgaatgagtgcctggatggatgaatggcttcctaacccatgtccctcctcccccttagtcacgtctctcacaattatcttcaccacaacctatgtcatcattctctgtgacatcaacaaccattggtttccctggcctctggtttatttgtcttcctgtttgcattctccccaatcctccatctacctcagccactgcctctgccccggccacaggtgcagactccagctcattcagagtggcttctatcccaccatgccaaccaaggccagctgtgatttcatggtgctgaagccaatggccactcttcaatcctcatcaactgtgggctctccatcagcttttgagagctaataagccccttctcaaaacttcctcttgtcttggtgtcaaccatgctgggctcaccttcatctccgatgtctctggctgctctttctcaggctcatcaatggtggcctccccacatgctctccaaatgctgggttcctcaggacacttctctccagacaccacctccctccatgacctcattcatctgtataactccaaatggcagccatggagtgaattgaccctgaatttatagctctgaccagatcctagagttatgtctttactcagaggtcttataggcctctcataactaaaactgaattcttgttgttgtctccaaacttatgattgtgctggttctcaggagagaggacagcactgttcacaggtgagttgccttcttccacctacattcagcagaggcagcaaagtacacccgrgtggcattggcacaaggatgctgggtgtgtcatctgcacctagatcctgccatgcctgccttggggtcacacaagctgtccagtatgcctggcctcatcctcctctcctccagcatgggagactccaccaggctgcagggtgcactcttgcctcccctccagcgtgggagactccaccaggctgcggggtgcactcctgctgccctgtggcagttactgtttccttcatcctcggctccaaagggcaaaaagtgagccccagcctgacactttccctctgggtgaggctgtcaaatcctctcctttctgatttcacctttcctggcatgtagagaataaggaataactccaagatcattctcatgggttttgaaacctcagatgcaaaagaagaaatgctctgaggttcctcagcctccagatgccacttcccagatcactcccccttggcttggcctcaggtgaaggtgtgtgtatgtgtgtgtgcatgtgtgtgtgcacgtgtgtaggggtctgctgtgtgcatgtgtaagaatgcgtgtgtgggggagtctgctgtgagtgcatgtatgagtgtgtgtgcgtgtgtgtgcacgtgtgtgggtctgctgtgtgcatgtgtaagaatgcgtgtgttgggatctgctgtgagtgcgtgtatgagtgtgggtgtttgtgtgcatgtgtgtggggatctgctgtgtgcaggtgtgtggagtgcatgtgtgagtgtggatgtgttgtgtgtttgaatatgcatatatatgggtctgctgtgtgcatgtatgtttgagtgcatatgtgactgtgttgtgtgtgtgaacgtgtgtgggtctgctgtgtgtgacatgggtgtggtgtgtgcacgtgtgtgtgtctgctgcatgtgtggattgcatgtgtgaatgtgttggtgtgtgactgtgtgggtctgctgtgttcatatatatgtgagtgcataagtgtgggtgttctatatgtgtgtgcgtgtgtgggggtctgctgtgtgcatgtatgtggagtgcatgtgtgagtgtggatgtgttgtgtgtgtgcatatacattgtggatctgctgtatgtgtgtggtggtgcatgtgtgactgtgggtgtgtgtgtgcatgtgtgtgtggagtgcctctgtgtgtgtgggtgtgttgtgcgtgtgaacgtgtttgggtctgctgtgttcatgtatgtgtgagtgcctgggctagtgcaggtgtgttgtgtgtgtgcacataagcatgtgtctgttgtgtgcgtgtgtgtgactgcatgtgtgggtgtggggggggtcatgcagtgtgatcgcatgtgtgagtgtgttttgcgtgttcatgaatacacaaatattgtgtgtgtgcccatggctggcagtgggtgggcgggtgatggggcgtgcagagggatcccatccttccaggagacgtgacagggagccccctcccatccagcacgctcccctgaatgcacctgcgctgccaaaaggaggtaggggtggggagggctgtgccgtggccgcttggtgtacccttgtggcgggagggctgtgctgcggccactcggtgtgtgcttggggcggggagggctgtgccgtggccgctcggtgtgtgcttggggcgggagggagggctgtgctgcggccgctcggtgtgtgctcaggcgctgtgagcctgcagggcgccctcgcgcttcttcctctgcgcagcccctggtgttgcgttctgagctgaggcttcctaattgacgctgacggatgggctcagactcgagccgacagagccagctgagcggagcctgttaaaaatctcacttattaacccaagtcctctaccacactcctgtccctgtcagggccatgctgatgaggcatgggggtgagggctcactttggaagacccagcgccaaatgagcgcgtccctgggtgctggagctcccaggcagcagagccctgggcttccgaagggggctgcccaggccaccctgagcgggtgcaggtgggccactgtggacccaggcccagcaggtgtttggggggctggggccagtggtgtccacagggcagcttagtggcagaaatgaagaatcccacaggcacgtgggctgatggcctctgtcctgagaggaggctcagggtgcagatttcatgggtgcctgggcctggcctgtcctgagaggtggctcggggtgcagttgtcacgggtgcctgggcctggccttgctggtttcagaggaggggtgtgttgggcgagggctgctggaggagggcgggccagcttctcctgtttgtggctggagtgccatgtgcctggcacccaggaggttctccacacgtaattaatgaattaattaatcacaaaagcatttatgttttacattttctctaaaattaacatttaatcttcctaataattgcctgaggggtaaatactatattgtcttcatttggcacatgaggaaattaaattttagcatcccagggactcacacccagggccttggactccagtgcccctcatcactcagccacaggaggcaccagctgggggcctcggtgtcgtggcctctgcccttctggaagctgccacctgaactccttggctcaggccacgccctctcttgagacgtccctccccgtttcctgtcttcctcatcgttgaagatgtagcttgggcacctggcccccaagacatcttcccaaatgtccagattattgatccagctccccaatgaccccacccatctctgaggccacacagcccccgtgtcatttcccacgctttagaaaaaaccacccatctgtttctctgctgctagaccgcagcctccaccttccctccctatgaccaacacactgccggcatctaccacacacataccatacaccacacatgcacgggcacacacatacacatgcatgcaaacacacatgtgcacacactttcacatgaatgcacacacaccacacacctaccacacacaccacacatgcacatacacatatacacacactacacacacccacactgtacacacaacacacataccacatatgcacacaccacacacaccacacatgccacacatccacagacacaaacatatacatatatacacacaccgcacacatgccccacgcacaacacatatatcacacatgtacaaacaggcacacaccatgcacataacacacatatacaccatacatacacatcacacatgatacatacacacatctcactacacacaccacacaaacatcatgtgcactcaccacacacacgcaccacacacatacgctacacacacacaccaaacatgcacacatacacagacatgtacacatgcacacatcacacacgtctctcacacattacacatagacacacacgtgcatgcacacaggccacacggacacaccctctgcagggcagccagggctctccttggccccctcaccccattgatggccccggccgtagctccagatgctgctttgtgcaggtcgggtgtgtccctggtcgacaggtcctctcagatgcattctctcctcttttccctgaggacagatgtggtgtaatgtggtctttggccacctgaggacgtggggaggactggatgggatgaaacggtgccgtgatggtggctctggggtggctccggcagtggcaccatctgcctgatactcatgtgacctcagtgacctctcctttccccacagcctgctcctcattgtcttctcagctccctgttctcctgctgggaggcacagtcaaaaggggggtttgtcatggtttcctgtgacatgattcttcgtttgggggagcagcaacgtcttctccgaataagacacacagacccccagcgcaccagcaaaatgcagcagaagggaagcagagccagacgtgtgcaaaaccctctcctaagagcacaagtgaagggttttatgtgaaaggatttgggtttaaatcagagctgctggtgtgacgcgtaagcagcctggggaggagggacccgcggcgcccccggaacacagcgctcccatgccgacacccccggtgcacagcctccctccaccttgagcagcgagagggcccatcggcctccggggtgtcagcaaatggcccgagactggccggaggccagaggcatgtggtcggcagcccatctgcagtgccctggatgtggggacccctgttagagagaggtcttggggtgcccagccccgtaactaagatgggatattcctgagtaaagagaaaagaggaggagaaagggagggggatgctgcagggtctgtgcgaatccacatgtggggcaagagagggggccagggagccgcagtcccagcaaagcactcaacgccagggcagagggcagagggcagagggtagagggcagagtctcgcaccacccgcttccaaggatgtgccgaatgccagcctgcctgcttttctgagagcagagctcctgtctgagtgccagaggcctgtagactgcgggggcttcagtgcctgcccccgggcccctcctggagacaggcagtggacagtaaaaagaacactagggactttaaacacatccccgaaatcttaacaacttaacccaagaaagtttgtttctcactcatatccagtgcagcgtcctgaggtggagtgtggctctgctccgtgtggccactctgagatccaggctggctcggcctctgccagcccttggcttccaagcttgccctgccctagagctcgtggaggggaggaaagtgtgtggaaggtctccacagccagtttagggtggaacccatcactcattcaccctggggccgacccaggcccccgaccacaccgagcagcagagtctgcaaggcagcatggcccagggaggcggggcaggcacggggcagcagctggtctccacctcagagcacgctaggaggcgggaggcaggaggcgagccggcagggctggggggtctctgggctgcaattcatggaattctgtgtcttctcaggctgctgctgtgaacaagggtggagaaggagtgagtgtatttgtatatatgaggggagcatgtgttcacatgtacaccagcgagagggcgtgatctgtacgtgcatgagtgagagcacatcttcacatctgcacgagggtgacagtatgttcatatgagcacaagccagagagggcgtgtgctggggagtctgcaacatgcttacttgtgtgaatcttgccgcccagctctttctgaagcacagcgatgtctgcaacgtgtcaccgcctgagcgtgtgcagagtgtgcacagtgtgcactgcttagcctctgctttgtggcatgcatgtgtgctgctttacacacatgtgcgcgcgccccagctcatggcaggctgtaagggtggtctgtcccaggatctctacagcttctggtggcctccaacagtccttggatgtgggtggctctctccttcacgtcgacccccatgagtgcctgtctgcatccgaatgtccctttaaaaggatgccagcaacactggactagggccaactcccatgacgtcatctaaatgtgatcctctagaaagaccctatttccaaacaaggtcccagcacagagtctgggcccaggaccccagcaccctgagctcagcccactggctgggactccggctttcccacctcggcagcggtgcttctctaagtggctctacaggtaacaaaatgtcaggaaacaccacacaccagtcctgccttttgaccacactgatgcgcggaggcctaggcctggcaccctggagggcaaaggaccgaggaagaggccacggccatgggagggcgcaggcctgagcccacctgtggcccagccctcaggaggtgcacacagcctcagcctcccgtcctgcaaacggctggccctgctcttcccagcgtgcccagcgcctgcccacagcagcacccaggccaggtgaggacggtgaggctgaagggcgcagaatcttctgcagggaaaccggtcatgcaggcccagcagccggagcctgcttccacgtctccactgcctcccgcgctgctcccagaataaagactaggagggttcaggtgcagaggagagaaacgcagggccccgtgtggaaggtcagcctcaaagtcacctgaaatcaaacatcaccgtcaccatgcacgggtgaccacgtagctttggagaaacaaatatttaaagttgggtgagatttgcttccctccatctgggactcgtgcgcttctgtgcagaggcgccctctgcaaagtgtggacacctgaaacaggctgcctgcaaagctgctctgtgacaagaagccaattcaaagatgaaaagaagctcagtttttagaaacattttcaaataatggaatgagcctgtggatggggtgctggggccccatcactctgtgttcatttgggtttagagggatctccccgcttctcgcctccttgccatggtgaatcgtacattttgggcagagggtggcagatggccccatatgggattggagaagacgtggctccctgccccctcctgccccctcctgccccccgtctctcctccgtccctgtcctccctctgtcctgcccccgcctgtccccgtcctgccccgtcctgccccgtgtctctcctctgtccctgtcctgccccctcctgtcccctcctgttcccatcctgctcccgtcctgccccatgtcgagcgccagttctcctgtccttgtggcctccccacccttctccctccccgtcaaacgctgaggaagccattgctgtcaggcggcaccgtggacgtggccttctccgggggagctctctgtggacacccacgtttccttcacgcgcacatccgttttatgatgtggagctttaaggacctgggaggaaatgggaggtttgcagttgtaaatggcgtcagcaggggcttcctcgcctgcctgtcaagatggaggccaagcccagggaggggttcctgagcagatggcaggagaaggcccttcgccgtgtcccccaggggctccgtgcaccaggcctcacctgcgcagcacggcagtgtgggtgtggcgaccactgcctcgcgtgggcacagtctcgcagctctgaagaggccattggggcagaacaatccccctcactctaaggagcaaactcctccaaagcaccacaaaccgcgacttgtgtcggggctctcacggcggggtccccggggtcaccagcagcatcacctggggaacaacgcaaatgcacgttcttgggcccagccctggctcagaagctctggctggccccgagctgttttacccgcgctccaggccattctgactcagggtccagatgaaaaccaccggggtaaggaatgcgtgctgtgtagacagccacacgcagggcagctggagcactcggggcagctgctaattaaaaagcaatgctcattcctcagtggacatctggaaaatacagcgatgcagtgaggaagaaatgcgactcccccggacccgcccagaggcagcaaaggcgcttatcattcgtgggcatcttgtcctctgatctttcttctgcgcatttgaactttcttttttatacgagtaggatcaccacattttgtacactaacaaagtttaacaaattgttagactttcccatgacattagggccttttccatttaacgagagctgcacatgctgttttggggacctgaatggcgtatcgaacccctgtccgcctctgactctggtctcccaccctcttccctccccaccgttccccgctgtccttggtctttgttgtcctagccacaccggcttcccagcactggctggactcacaccccacagcaggaggaccgggcagggtgaggggtcccaaaggtctgggcttaccactgaagttccacttctccaaccggcttgccctggccctgtcactgccttctctacggtcccacgcgctctggagatgcttgtctgtgggcccgggtggttggcttgggggaggctgccrtgcgtgtggttttagcacggcacaggtctttgcagatacacggcacgtgtcacagtcatttgagcaccgtcctcctgtttgtcaccgagtcatctctttttaacagaagctcatccagaggctgtggtccgggtgaaattagggagcagcgtggaatgtgggtagggacttggcttagggacttctaaaccaagacgaaggcttctgggtttggaaggagggcgagttttccacatcctaaccccggtttgcacaacgctggtttccaaacggaattctcaacataccagccctgggctaccgctccgggaactcaacctccatttctgtgaagcccagctacccayctgtggtgggtcagacaggtgaaatcacgggcctccttggctatacgttaaatggaagttaaatggaaattggccagcacccggctaccaagggtgacaccggctgatgaaagatgcaccaaagcacagatgagccgtccattcatctctctcgcttacagctttctcagctgacatagagtttctggtctcctctgacaacttctttcttttcaccattaagaaaaactccaaataatttcaatttgcagctcattagcaccctatgcacagggagtgttgaaagagtttttctttttcctcttgatgaaagaagtccctggaactcaggacgccctcctcagaattctctcctttgttcttcccaccctcctccctcacctccctcatgccccaaagggagtggagtggaaagggaggaaagaaagacaaaaagcgaaacaggtgccccaggaagggcagcggaacccctcctcccacaaagccccttccctctgggcgtctctcccggcaagccccaagggtcccagcacgggaggaggacggcccctcggatctaatgagcggacctcacatccaaaaggggctgcgatgttggggtgcccctgccttggccagrgcagacactgccctctgctcayctgtgtgcaccagagaacrtggtcgagggatgccgggttgataaggggagcccggccaaaccctcagtcacatggagtccgcctgccctgaacctcctcatttctcactgcctgtcctcagagcgaggcttttttcactgagccatgtcttaagtcgagggtggtccttccctacttagacagcgaccccatcgccctatcacctgtcggagactcattcagcattggggatacagatggccttgtcctgagttccagggaccccaaaatgtataaaacagcctcagctttggtctagaccctaaaatccagagaagcaccctatgcaaagaggtgtgggtagaattggacccgctgtttggacctcgtcagatgaggggaggctgtcacagcgaggaagccactgcgtggagtctcggcacaggggccggcctgtggggagcatcagtctcccataagccgagtgctcatcaggttccccaagcttagcagcttggcagcatttattattgagcaagtatttcatgggctcacgcacgttcctgtgtgatgcctggtgctgaggacattaaatcctgtatatttggccagggttcttaggatttgggtgccagccctgggctatctcctgcccttaagcttagaaatctcaagacgttgaacacactcaggtacacagcactgtgccaacagccacgatggagaggagacgcatctacttcacgtggagatttggggtgaagtcattttgatactaaaacatacatgtgtgtgcatatatatatatatatatatatatatatagagtagattacaaaaatccatgagttttttttgttttatttttttgggtttttttttttgagatggagtctcgctctgtcatccaggctggggtatagtggtgcgatctccgctcactgcaagctccacctcccgggttcaygccattctcctgcctcagcctcccgagtagctgggactacaggtgcccgccaccacgcccggctaattttttgtgtttttagtagagatggggtttcactgtgttagccaggatggtctcgatctcctgacttcgtgatccgcctgccttggcctcccaaagtgctaggattacaggcatgagccacagcgccccgccccaaaaatccacgagtttttaagataacagatgaaacttcaaagacatctcctacctgctgctgaccctcagtgctcagtcttcagagcccccgatgtggctggggagggtctcatggaaaagcgtgagccctggggtgaggagcacagaccccagcagtcccgccgtccccgtggaaagcctgtgcccagcagtcctgccgtccttgtggagagcctgtgcccagcagtcccgccgtccccgtggagagccagccyccagcagtcccgccgtccccgtggagagccagcccccagaagtcccgccgtccccgtgaagagcccagcccccagcagtcccgccgttcccgtccccgtccccatggagagcccagcccccagcagtcccgccgtccccgtcccygtccccatggagagyccagcccccagcagtcccgccgtccccrtccccgtggagaacccagctcccagcagtcccgccgtccccatggagaccctgtgcccagcagccccgctgtccccgtggagagcctgtgcccagcagccccgccgtccccgtggagagcctgtgcccagcagtcccgccatcccgtggagagcctgtgcccagcacggcacctctagcccagcctggcatagcctcgtcaagttgcagagcccccagtgccagggcgcccgcctgtggaccccacacgtctagatcgctgctttgggatcacgggggatggtgcgctgcgaccatgatgtgttgtgaagttctgtgctcactgtccgcagcctttgcttaaacaacaacggttggctttatctgatgaaggtggaactgcagtgttctccacgtggccctcacatggctccgcagaagctcagggtgttgtgggccaggttcgcctccacccacttcagccagcaggggcagctcccccgtcctctctgccgagccctcgtgagttggacggtggccccggcttccagctccggcctggcggttccctgatctcctccccacgcaccctctgccrtcagcctggtattttccatgacccattacagtcctgttccccgaacctgcctcctgttcaaggacagcaagtccatcccatgggcagggcccagcaggactgggccagtgagacggtttcctgtgaggatcctggggtcaaagtgccacaaactgggtggcttcaaaccacagaaatgaattgtctgacgggaccgcgggccrgaagctggagatccaggtgttgtcagggccacgtgctcaggaagctctcgggcgactctctgtggctcctggcaatgccgggggctccttggcaggtagacgcctcactccgttccgtctccgtcctcggggcgtgtctgtgctgtctcttcttagaaggaygccggccgtactggataagggcctcatctttactaactccatccacrgagaccctatgtccagaaggcggcattcactgtgctggtgttaggagttgaacgtgtctttttggggaaacggttctgctcgccacagtgccttggtgtcatctcatccaaccctgggcctacgcgggagctcacacggcgggggtggcgcggggctccttccacacctcgctcagggctgagccccctccagggccagagtcacagcctcctggctccacagcctcggtgtcatctcatccaaccctgggcctacgtgggagctcacacggcrggggtggygccgggctccttccacacctcgctcagggctgagccccctccagggccagagtcacagcctcctggctccataaggcatctggcttgtcgcaacacgttcctctttggactgactcagctttcgaaaccttcttacttatcctaagcaacagtacccacaaattcatgtttttgatgtactattttgctttttctcgtgcacattaaaataaagttttaaaaattgcccacattccacataaaagcaagtgacacagcacacttcgggaggtgctgcagggactgaacgtgtgcattaaaataaagttttaagaactgcccacattccacataaaagcaagtgacacaccacacttcgggaggtgctgcagggactgaccatgtgaaatgtgaatcgtccaaggcaacaactgaatcttatagatgcttaatccaaaagagtgttttcaacaaggtcaattccaggcccagggtttgtccaggacagcggtccatactctttttggcaccagggacctgttccatggaagacggtttttccatggaccaaggttgggggaaggtttcaggatgattcaaacgcattacatttactgtgcacttaatttgtgttattattacattgtaatatataattaaataattataaaacccaccatcatgtagaatcagtgggtgccctgagcttgttttcctgcaactggctggtcccatctgggggtgatgggagacagtgacagatcatcaggcattagattttcataaggagcgtgcaacctggatccctcacatgcacagttcacaacagggctcaagctcctatgagaatctgatgccactgctgagctgacaggaggtggagcccaggcagtactgtgagccatggggactggctataaataccgacaaagtttcactcgctcactcacccgccactcacccgcttacctgccactcacgtactcactcacccaccactcaccggccactcaacagctcactctccygccactcacccactcacctacctgccactcacctgctcactcacccaccactcaccggccactcaacagctcactcacccaccactcacctcctgctgtgcaccccagttcctaacaggccacagactggtgtcagtccrtggcccagaggctggggatgcctggtccagtgggaagayatgggtgggagatctgggatgcccatggacttttacagagtgtgagtttgggggcaaacacacttggagttggacctcagctctgctgctcactagccaatgatctcagctcacagtgcttaatgttctaagcctcagttttctcatctgtaaagtgggaatcatagcagcagttctcagggatttggtagggtmacccacgtaaacatccatcccagagcctgacgtgccatgagaggctccacagacactggatctcagcttctgccctggaaggaagccactgtccccagaaccacttccgggccagagtgaaggcagcyggacagcaggaggccaggcatttgcaggggcgrtgcctagtctctgcagctgacagctgtatggaaccctgcagtgttcagtacaaagctccaggatgtgaaggatttgtcrgctctcaggcatgcagccctgccctcaccctcctgtgatgaattgggccaggcaaacagtagaaataggagcagtcccctggctgtgcagaaaggcatctgcccactgggctcctgcttgtcccaaggaacacctcttccctccccatggccccaggtctgaggctccatcctcctgggaccagaggagacatctgggccctgtggagtcctaaaccttggccacagcatgacaagggcagggagtgctrttcctgctctctgaacccacactcgttctggctgccatgtgtgtgcagcaccatctctccaagcagccgtcttgtggcttccccatccaatgggccgggatttccttgtaatcagccaggaagcattcctactctgtctgccccaacccatctcaagagggcacggaaagggctgggcacctgcaagctgacaaaccccattgttgtgggaacatatgtgttctcgggcacagttccctggtggtacaaaccgttcacctacagctttgccagctacatcggaagggccccatttctgcctctcctcccagaagatcatgtcaaagacaccagcctggccaaacctagcagagaactgagggcccagtctggggaagaatcagctttctgctagaaggaggtgggccctgaggggagcagaggctctccctggaacagaggagctgatgctcagaggggagcccagggcagcccctgagcttggtgctgctgaggtgcaggtctgatgggatagaggctgtgcaygcagaggagagcgggaagctgggcccatgccagtggccctccaagtactcactttgttcatgcagaccaccgggccctggtctgcctggactgagggggttctcagtgcctcaacccagatagctctgagaaactggcaggccacggaaatcatcctggcctcctcagaaagatccaatagttcccaataatcctgccagtaagaatgcagagacagaagatgtacacacacacacacatacatgcgtatgcacatacacatgcatatatctttatgggcacacagatgtacacgcatatacatgtatacacacatatgcatctatgtatacatacatacacacatatacacgtatatgcatctattgcacacatttacacctgcacatatacatatataccagacatctatagacacatatgcacacatacatgcacacatatacatatatacagatacatctgtatgtacatatgtgcatatttttgtacacrtgcatgaatacatatgtagatatacatatatacacatatatacatgcacctacaggttgagcatcccagatctaaaacccaaaatgcccccaaatcgaaaactttttgagcataggcctgaccctaaaggaaaatgctgatttggagcatcttggatttcagatttttgtatttgggatgctcaaccagtaagtrtgatgyaaatattctaaaatgcaaaatttgagacacttctggttccaatcacttcagataaggaatggtcgacctttatatatattacacacacacacatttttgtggcttgtgatagtctgctctctactgtgtgcacatcttcccacacctcttcacaaagaggctaagtgggcctttcaggtgcactcagcatcagcagctggcacaaaaccacctgggccgtcacccagccggtgcacacacagccacggtgtgtgtggagaagcaccagaccccatcgctaacgcagaacaggacagggctggccccaagcactcgggtccctcctgcctcagaacaaagccaggctcacacagacactccatgtccccaaggtgggggctcctggggcctctggctgtgtctctctcccttttgaattgcttctgttctgctttgcaaaacactgcctggtcttattattgaagttactttcttgggtttattaagattcttcttttactcaaatattgaccaaggcctgccctgcccccrccgcttaactggcaaacaggctgtggagccataacctgacactagacataacgacacaacgttaatgactttaaacaaccgggagtttacgtcgaatacatgttctatgtgtctaattttcacccctggtgctcatttaaattcttcgcatgttttaaaaatttatgtcttccttttcccatctccctgaattttactccagcctaatttataagaaaaatgtgctttgaacttttaactaggatgctggagaacaagccacctttcattcctgatgagctgcgatcttttcccttttcttcagaccttcagttgatgatgtatttgcacacgcacacacacacacacacacacacacacmggagtatatatattttttctatgcttcttaaagaaacaacaagtccttttaaaasacctttcaaatgcacagtataagaagcactgtgggggagaggaacagagactcccagagaaggagtttccttaatgcttactggaatttgctattttcttcttttcatggaaaatgtgtctgagagcaccagtacagctattatctgtatcctgtggcctttgtgggtatttccaggcagagagaggactgagtctagtgtgcagagcggcactcccaccccacgctgaggcagcgcatccctctgagagctcaggggcagcaagggcagtgagggcactgcatggcgagagggtaacctggatcacaccaatgtgggatgcttgttgccaggctccacacacagtggataaaaccagccttctctcgtgagtgaggcctagacctgcagggtgggaagaggcaggactgggagaaggggggctgggaggaagatgacatcggatctgtctgcagaaatcatctgtcaagagtcagaaggtgtcagatcttgctgaatggtgggtgggtggtctctgcatcacctactggtcacccagtagggcgagaagggtcagaggggagactgtgtgcatgtgtgtgcaagtgtgtgtatgtgtgtgcacgcgtgggtcctcaccttatgtgtcacccctcatctagagctatttggctgggaccttggcattctctggagcagctgcagttacagaatggaagctccgtgcacagtctagaatcatctagagctttttggctgggaccttggcattctctggagcagctgcatggttacagaatggaagctccgtgcacagacactggagttgttcaccactgcagtccctagaacttggtctgacatatcatgagtgctcagcaggtacacaacgaatgaagaagtgtgtggaaagaagggaaggcagtcctcacagacatggaagaaaaattcccagccttagcaaattgtttcatgaagtaggaggttaatcctctctgatattaagagctaataagcattcttaagagctgtatgccaccaaactatgacttcgcgggggcattgggtaaacaggcccctccacacccggtgaggaattagatgctacgaaataagggcttgcgcctgtttcttaaggaatcccttactgtgcaatttttaaatttcccataagatcctctttaattttaacttctaaatataataaggatacatcaatattatctactcttgcatatgtttctactaaataatttcaatagtttttcttgaggaacttttagaaaatgtttattatttcactgtctagggaaaatgttagcaatgaagaaattacaccaaaaagaaaagttgacatattttgccatcatgaaaaacctgcccagagctccacaaaaaatcatgcaacagttcccaattccaaaatatattacaaagctatggttattaaaacaatacactactggcataaaaacagacttatagatcaatggaacagagagtccagaaacaactcatacactgccaagtgctccttcataagcatgaggagaatacaccatagggaagggtcgcctcttcacrggtgctggggaaactggatgtccacatgcaaaagaacggcatcggaccctcacctcacatccacaaaaacccactcaacatgggctaaagactgagacataagactggaaaccataaacgtactagaagaaaacacgggggaagcatgatgacattcatctaggcaaaggtttcttggatctgacaccaaaggcacaagcaacagaagcaaatgtgaacatgcaggacaacatcaaaccagtgagctcctgcatcagcagggaaacaatcagcaaatccagagggcagcccacgaaaggtagggtgagtggtgggtgtgtggtctctgcatcccctactggtcaccggggaggaaatatttgcataccacataacggataaggagttaatatttaaaatgtataggtggctgggtgtggtggctcacacctataatcccagcactttgggaggcaaaggtgggtggatcacttaaggtcaggagttcgagaccagcctggctaacatggcaaaaccctgtctctactaaaaatacaaaaattagctgggtgtgatggcgggcacccgtaatcccagctacttgggaggctgaggcaggagaatcacttgaatctgggaggtggaggttgcagtgagccgagatggtgccactgcattccagcctggatgacagagcaagactccatctccaaaaagtaataataataaaataaaatgtatagggacttcctacaattcaatagcaaataataatgataacctgatttaaaaatgggcaaaggactttagtagacatttctccaaagaaggcatacaaatggccaacacactgtacatggaaagatgctcaacatcactaatgatcaggaacatgcaaatcagagccacgatgagatacgtctctgtacccatcaggaggctgtgaccaaaaagacgtgtgttggtgaggatgtgtagactctgaacacttacatgctgttggtgggaatataaatggtgcaaccattatggaaaacagtatgaagttttctcaaaaaattaaaaatagagccaccatatgattcagcaatcccacttccagatatttatccaaaggaagttaaatcaggacctcgaagtgacgggtgcgctccggagttcatcacrgcattgttcacaggagccaagacatggaagcacatgtcccccagggacgagcgggcaggaaagcgtggtgcatagacccagtgggtgctcttcagccttaagacaagacggacaacctgccatctgcaacaacagggataaacctgcatgacatgacgtgaagtgaaacaaaagccaggcccaggacagaggctgcacgacgtcgctgaagcgtggaatctatgacaattgaacgcaccgaagaagagaggaggatggaggctgccgggtctggcgctgggggaagcacgggaaggggccgttccaagggcacaaggtttcagcgacgcggcctcaacgcggtctcgacatctgccgtacggttgagagccaacagtaccacgctgcacactcagggaagtgtcaacacggtgggcctcgctacacgttcttagcacacggaagtgaagtcccatgaaggaagcggagtcggagagggacgccggggcgggtttcacggtggacgaaggagctgcacsccgagaagtccagccaggtgccacaagccagaaaaggtcaggagccgccccagagcgtgcggcccacccaagccctgacttcagctcagtgaaacccatctggaccgtggcctcctgtgagagaataaatctgtgttgttttcctgcaggtttctgataagccacgtgtgttttgggggagacacaggaagccaaggaccaagcactttctgtgcggccgttctgttcttccactaagcgggcgttttccttcccagaaccctcggtggaggcattcagcagcygcctctcctgtgaatttttcttaaatatcatttggcaataaatcatagcgtgcccatcaaatttttccckagagaaaattattatttttaggcctttaaaacatttgctctttccttcttctaagatgatgtttgttttcatgcaggctaagatgtttttacctatactctatcacccacagatttctcaacccagtggggcagaaatggggatttgtgctgtttcatatggaatttgacattaaaaaaatccatgcagctgctctcacggggaggataatatcccccgcacctgggttaacgcagcactctcgtgatgcagagcctctccgtgaataaataaacctcgacagctctttctggagacggcaaagcagtgctccgtggatgaggccgttcatcctgcctcaccgccgttgctcctaacaggggtcgagagactgatctcgaaggcagcgctaagcggaaggcctgatactttcagcgtcggttcagtttctggtctggcgtaacttgcaccgtgtagcggaatcagatgagaggcacaagacgcattgtgacaccacataagcaccacraagagaaagctgtggattgggtattgggtattcmtatatatgtgcatatatatatgtgtgtgtgtgtrtatatatatgtgtatatatatgtgtatatatgtgtatatatatgtgtatatatatgtgtgtgtatatgtatatgtgtgtatatatatgtgtgtgtrtatatatatatgtatatatatwttttttttgaaacggagtctctctctgttgcccaggctggagtgcagtggtgcgatctcggctcactgcaagctccgcctcccgggttcacgccattctcctgcctcagcctcctgagtagctgggactacaggtgcccgccaccacacccggctggttttttgtatttttagtagagacggggtttcaccgtgttggccaggatggtctcgatctcctgacctcgtgatccgcccgcctcggcctcccaaagtgctgggattacaggcctgagccaccgcacccggcaggtattcatattttaaaagttaaaaaaagcaaagaacctctttctttctctaataagatgttgattaaattttaagtgaacaaggtacaagaggtgaaaacacaacatctatttccacagaacgtccgtacgagggtgttcccaggaggaggagtgcggcggcctgggaggcacatggatgccgagtctttggatcagcagagggtcgttgagtcgctttgaggggccagacactgttgtaggagctgggagcgcagcrgggaagcacgctaggggtccccttgtcgcggagaagggacaggcactatagtgaccgggtaatttctagtaaggtgtgatgtgaagaaaggagaagagggcacagtgatggaaggtggggctaagcagaggcctctgagcgttaggacgagaagaagcccagcctggaaagaccccggggagaaacacagaggccacgcaggctggctgtggtgcctctgagggatggaggagggcatctgtggtacctctgagggatggggaggccgcctgtggtgcctctgagggatggaggaggccgcctgtggtgcctcagggatggaggaggctgcctgtggtacctctaagggatgggggaggccggctgtggtgcctctgagggacagaggaggctgcctgtggtgcctctgaggtatgggggaggccggctgtggtacctctgagggacaaaggaggccggctgtggtgcctctgagggatggagggggccggctgtggtgcctctgagggatggagggggccggctgtggtgcctctgagggatggagggggccggctgtggtgcctctgagggatggagggggccggctgtggtgcctctgagggacggggtaggccgattgtggtgactctgagggatggagggggccggctcgggaggtggttcgtgatgccgtgtgttgaaggctgtggatcttgtccttggtgggtgcaaagccagcagacatttccagagggagagggatgtgacttaaattgtgacttagaaagttcactccacgctcagaacactgggcctgaggagcacacgctggagtggaggccctgggccagtcggaggggcagtgtgcgagtcagatgagggacccgcacatggagctggggcaggacctgctgtaggtcccaaggtgaggagggagccctgggctgggtctgctctggtggggaaaatgaaatgtctgcttggccaagttacactggggcctgcagtggagacgttgagtaagtggctagaggaacacaygttcagcgtggggaggtctcacggcaagagatggcgatgtggggtctttggagcctggggagagatgaaggccaggccagcycggatccgaggctgacagcagagagcagggctgctgaagcctcggtgcagggagggcccgttgccctcagcatccctgtccagcacctcccacccacgctccagcctcacccagcccttcctccccacgagcacacagcgtgctcctgctcctgctggccccaccccgatggtgggccaggcccagctgcaaccactacctctctgacccgatggggttgtcatgtctgaagggcttgccacgttattcagtcacatttaggggccaaatctagaagttggagaagaaaggaggagggggcagcaccctagtcacaggggtggtattgaagatggcacgggggtctcctctcctgctgccttcctgggagagggactggagggcacaggtgctgagaagaagtggagtccctgagtggagccgatgggatgtggaggaaggcctgaggagccggtgggacgcccaccctgccccaccccaccccacagcaccagcatctgctgattgagtttaaatatcaacggttcaatgtgtagagccatctgtaatacttttagccccagattctttcacatcaataggcaaaaaagaggtaattaataaaacgaacataaagttctaattatagggtgtaaatatcgctctcaggagaattattaagatgaaggatgggttttgtgattaggagaagaaaataacctgcccaggggaatggaaaggaggcagacattctcagaccagaagcgacgtgtgtgtgtgtgtccgtgtgtgtccatgtgtgtgtctgtgtgtgtccgtgtgtgtctgtgtgtgtggaggggccactgctaacgactgtacagccaaatgggagaaatggccggtctgttactgatgcaaacaagaaagccagcatggtgacaaaatatttagcatggggacaaaggtcacagaggcatccttgtcatctcccagaggtgacaaatcacaggttcgtctcagaggcaatttcacattccaaaaggtagagaaataattcttttctatttttatttttatttatttttttaggactgagtctcgctctgtcaccgaggctggagtgcagtggcacgatctcagctcactgcaacctccgcctcccaggttcaaacgattctcctgcctcagtctcccgagcagcttggattacaggcgtgcgccaccacacccagctaatttttgtatttttagtagagacgggatttcaccatattggacagactggtctcgaactcctgacctcaggtgatccacccgcctcagcctcccaaagtgccgggattacaggcatgagccacgacgcctggcccagagaaataatcgttaaagaaatgtaggaagacagacctggggtcaaaggaaagatgagcatagtccccagtcctccagcttgagagctgcggggcctctggaggttcagaggggtctcaggaatgggctcagaattcaagactacaaaggatgctaaagacaaagattcaggctccaaagaaaggaaggaggacacataggaaaatgtaactgacaggtgcacacccagcctggcccaacgcagcccctcaccatggtctcagggctcagggagctcctggaatgcaagcttcgcgttgaaggatcccacaggcctgcagggcagctctctggccaggccctgccaccgagtggtacgtcccacagcacacccaggagcctgtggccgcctcccgtccgggccttggaattccttttggctgacagtctttgcctgtgtgaccctcaygggatgcctcccacgacctcagcctgtgaccctcacgggatgcctcccacgacctcagcccatwagcatccctgtggccagcttgtgtaacctgccaggcaggaggctgggatgaaattctcacttgccacaccttgtaaatatcaggtgtaaatatcaccctcaggagaattaagatgagcgatgggatgtcctgcaggcccagcaacaaggccggactctcctccgcttcatgagaaaatgtgtgttgtcatcagatagcctttggggctgcctgggtgcagattcgaggctacctacttctcatttcacgttggaggtttcacggatcctacatattgcagagaaacctgaggtccgtttttggttttgctttatagtgataaatccgggatgacacagccgtgggccgtgttgagggctgggatttcggtgcagttgaatccccggctgtggccccagtgcccgttcatgggcccctcccgtgtgattctcccagctgagccgtgagttcgtctgagcggcgagtcggaactcgaggcagatcactctttgctgttgagatggttggatcagtgtgccccmaaatctcctgtcgaaccgtaatccccagtgttgggtgtggggcctggggggtggtgactggacttgggggtgatttttgaatggtttwgcaccaccytctccttgctgttctcatgatagtgagttttctgagacccgtgtgtttaaacctgggtagcccctcccaccttgcgcctacgcccaccgtgggacgagattgcttccctttcgccttccaccgtgactggaagctccctgaggcctccccagaagcagaagctgccgtgctccctgtgcaacctgcagagctctgagccgattaagcctctttcctagaatcatccagtctcaggtgtttctttgtagccatggagaatggactaataccactgtcaaagatggtccaagtttgtttcctctctccaaccrgatttttaacgtttccttctcttctctgcgcctttcccagtgatgaggacagtggcttccatgggcaggcgttcagtaaacagcacccagtgaactcagagctgccagtttaccccgcaggggcagcagagctgactaggattgggtgtagatgagctcagagcccacaaggccccacagggatgtcaccatcccggtaaaatgtgagattcgggaatgaataggaaaatcatgtgcttagtgcacgtaacatcagcagttgggaaagttcaccgggaaagaaaagcgccacaagtcctcgcatcaatacttgcagagacaaaataacctcaaggccgatctttcatgcctgtgcctgggcatccccgcgtctctaaggaggacagttatgtaatttagatggaaaattgacaggactgggcaggtccctctgattgatgtggaggccgtatctcacgtcctggaacgcgtgtgtttatttgctgtttcacggggcgggccatttttctccagccaggaagggyaggggtgtgcaccatagggcctctcccaagttcgcctcggcgcctgcccccctccatcacggtgatcasgtgtggccttagccccrggtttctgagggcgtcagcatcacatgtgtttgttctgcttcatgggctccctccgtcaggcaggtcagggtgtgacatgcaccccttggtgaccgatgggctggctgggtctcacagaaggtacaccaggtgagctgccaggtgccacctcctccacctcccgcctcccgcctcgtccacaggctcaggaaccctctggggatgagcacaagcactttcttttgaaaacgcctccatggcggaagttccttggttggggaggactttgttgttatcaatagcttgaaaatgaatcaagttccctgaataaacatgaggtcaacctcagcaacgttagtttgggcaaatgtcagagcaagcacagaaagtggctggaaggactttctcatgcgacttgtaaataaatgactgccgagtacagaactccaagggccacagatagacagcaccttgggaagaggttgagagttaaagagcagtggttcccagcctcagccccctggggagggtgagcaaacagacggtgmtgaggccccatgtggagtcggagattttgcaggctgtggctggggcccagctttgctgcagctcctgggggcctcccaggtgcataggtgaggggcttttagtttgagcaccctccctcctgccaaagtgccccctagatgcacaggtgagggggctttgagcttgagtccccctcccaggtgccacccaggtgcacaggtgaggggcttttagcttgagccccccccgcccccgaccccgccgaagtgcctcctagatgcacaggtgagggggctttgagcttgagccccaggagcctcccaggtgcacaggtgaggggcttcaagcttgacacccccaccccatccccaggtgcctcccaggtgcacaggtgaggggctgcgacgcacagggatccatgtcttagaggaagtttcaatactttataattgcatccccgctaagtgagggaagcactctggcctctttcacatggaaatccctcctctctgaggaccgaggtgatgtgctttagcatgacaatgagtgcaggcagatatgaagtattttgtgatttaaattttgcttgtgatatttcaaagaggtttcctctggaaaaggttactgggagagaaggtagctcactgttctgctggtgagctgtctccacaactccacacatttatcgtggtttcaggctgggtgtcttcaggctccttgagctgctttgcagtaagtgacacaataaaaaatgtaaaatacagaaggcacccacttttcccacttacggttttastgggtgttcacagaggcgatgaagaaatgaaatccccacatttaaacaaagcggagagtgacagtgagggtgatagtcctattgtataattgcctcctttgactcagagagggagagcctattttcatacttatccgaaagcagtgaagcttcaaagaataggggcagacacaatgggctttcagagggaagctgccatcgtcgacgctataattggtcaccgcactgcccgagtgcccgtaggccggccagacgcagaaccggaagtgcaggcagcctgggtggagcagggaggtgtgagcccgggtcagagcagagaacgaggggaggtgtgagcccgggtcggagcagagaacgaggggaggtgtgagcccgggtcggagcagagaacgaggggaggtgtgagcccgggtcggaggtgtgatcccgggtcagggcagagaacgaggagaggtgcgagcccgggtcagagcagagaacgaggggaggtgcgagcccgggtcagagcagagaatgaggggcgagacacaggcggccccctcccggccacctgggccccgagcttgtcctgggcccctcgaggtgtgctgccgaggcccgaaggtggcctggagggtggggacccgggaaggggctgtggggccctcagcgtggcctcagaaacaccgaaagccttgacctcagacctggctctggcagagagggggccgagggaggcaggtcagccctggggtccctgcaaggcggaggaggcaaaggaggaaattgacttctgcctggaggtcaggagattactgcttctaagccatgggaggagaaggggacagaaacacccctgtgtggtgccaggggtgccacgaattatgccattcaggcctccagtggatctatacgtggccctgggggacggtgtctcctagaggctccgagctgctgacaggacacttaaaacccagagaagccaacgtgttttccacgtgtggcagaactcaccattgctcctgacagccggagggcgagcatgtgagaatcccacgtgggaatgaaccacgagcatccacccatcccaccccggaagaggcaccacgccccgcccttgcccccaccccagggtgaagccacgggccctggaggcccctcagatcctttcctcccccaatttctgtgattctacttataatttgaacaattcaagggtcaaactccacctctagaaacgtgcatactcacagggtacacagggggtccacagagcaccccaaaatgtaaaggttatcaccgccgcgagggtcatctgtgacatggagaccaacctctgccatctcacgtaatgaaacacctttagaaaaccttacaatttttgttcatctgccacattcttttcagcagaaactgtatttgctctgcagagggaacagcaggggactctcggctgggygcctgtgcctgagcccgtcctgggcagctccaggccctcattctcccgaccacaaccgcagctgcagatgcagctgcgcccccttcctctccccgggcacagcgcattgtagaggggtcccattaattctgaaaaaaagccttacaagatagatagaaaatttatctcatttatttaagctcatcactgctgattaatcccaaactggggtcccttgcctccactttagaaaaagagatgagttttaaactcggcacccgcggccctgggagattgatccgcccrgtcatgctttgaagttgaagcgcagtgcccatcgattgcacacattaaatgaccagccacgctgtagaacgtacagctcatgaataagaagtrcccaagccctcctagtcactggaaagcctcaggtccagccatcacggggcagcctccgggtggcccatctgcgggctgtaggagcagagacccccggccccagcctgggcagacgtctgtcgtgcagtgtggccagcggacaagcctgctttcctcattcgcttacaaggtgttctgtgagcacccagcttccccaaggtcctactgagttgcttgggacactggggagcaggcaaagacgactagcagatgccctggacgtgcaggagccgtgccatgtgggatccccacccccgaaaacacaccctcgagctgaaggcagctggtgctgggacgcggagacctcggctgagctccctgggggtggagatgggcttctctccacygctggctaatgtcmgccagagccacagcaaagaggggacccaggagaggtggccccggggagctgaaactcagggagatggcccagggctgggctggcctgagtatagcaagtacgctgcacaccaggcgcagatgccccgctgcgggcgcctggcctctcccgcggcttgctggctcagtgcgggctgcaggtcagaggccacaccttgcagaaggcagatgggaacgcgagccccaccccatgaggcagctcaagatgatctgtaagagtcactcgattgagcggcatgaacggggagggggcttcataaggccagagagttccaggcaggggccacttcgcccaactttgacaaactggcagtgtgacccccagaggggaaggacaggctctccgggcaaaggggactcctccatgacaggctggttttattttatcgaagcacttcgtggaggcctggtcggcaggaaaagccgcacatattttccgtacatatcttcaggattttggggatccgcgtgcgcccctctgatctgccctcttgggtgcgctccgagcgtgctgcacggcgttgctggctgtaggtgcgataccctccaggtcctcaggaaacatggtctgtaccagaaacctcctaggagaacgctttgtgtttgtgacataacaaatgtaagcatttttgatgttcaaagtcctctctcaaactttttttgttgccaagtgaatgtaaaatccagaggatgctcttggtcgagagggtgactaggagacgtgtggatgaagccccagagcccctccgctctcaccaccctgagtagggcaggtgggtgcagggagggggggcgggtgcagggagggggggcaggtgggtgcagggagcgggggcgggtgcagggaggacaggcaggctggcgccaggcaggcgtgtggaggcgggacccgggcacatacatgcatccgcctgcaccagtcccgacctcagagccaagcccagcggccgctccgcttcccaagcacgtaaaacacgccaggcacgagaatatgtggacgcgggcgcttatttcttgttgaattttgttctgttctgttttcaaacatggaatcgggtgttgcatcgtgttccatgatttgctgaaaatacttaacaaatacgaaactgtggaatatcttttcttatcacagcaaatggacgtatctcattcttcttagtcacataaaatatttaaataccctccgcgagagcttgtttgccactcatttatttgctgttgcaggcgatgccagagtgactgttctcatacacatacatgcacttatgctataattcttatcaattagattataagaaacgggattttttttgctcataaagtatgtgcatttttattgccaaattactttccaaaaaggctttatcagtttgcatgtgcaacagcagtatattaaaaaaagttattaaaccttttaacgtttaccaatgtgatggtgttaacttttgattttttaatcattacagaacggaatgtctttcatgtacttatgtcttcccctgagcttcacccgagcagagaaaatgctcctggaccctgtttcctcaccaagttgtaggagctatttgtctataggaaatagcaaacttttaatacttctggattaaaaaaaatagcttaggttttgtgacaacttgaacccaagattaaaaagtattttatattttcttctaattatcttatggtaaattgtttattatttagattttgacctatctgactttttaatattggaatctcacttcattttcttacacaatttcccacttgtgtttatcgggtggattttttctgtacccacgggtttgaaatgcccccttcgtcatacactccaggcccttgtgttgtcacgttcattcctagaccatctgttttgtactactggtctgaacgctgatcttcacgcaaaacacgatttaatacctgcaggagcgcccggtctccttcctgtgcccccagattgcttgacagttcctgagcatgtactccaggacctgaacccaaaccacctttagaaccaagttaatgacatcctgccacccccgcaccacacacacacaccaccatacacacaccacacacattcacaccacacaaacaccacacacacacccccaccacagacacacacacacaccaccatacacacacgtcaccaccccacgcaccacacacacacaccaccatacacacaccacacacaccacattcacaccacacacacccccaccacacacacaccacacacacaccaccatacacacatgtcaccaccacacacaccacacacacacaccacacattcacaccacacaaacaccacacacacccccaccacacacacattcacaccacacaaacaccacacacacccccaccacacacacaccaccatacgcacatgtcaccaccacacacacaccacataccatacacacacaacataccacacacacagcaccacacataccacacacatacctgcacacatactacacacaccacatacacatcacaccacatatactacacacacaaacataccacatactacacacatcacacacacaccacacacataccayatacacacacaccacacatataccccacacacaccacacatgtaccccacagacacacacaccataccacacacgccacacacacatacccccacacacatacacacatgcacacataccacacacacatatcacacccacatttcacaccacacaccacatacacacacactgtcaaaggctggggacctcaggggaccacggagccacctggtgtgtggctgaattcccttgttgtcaggtaacacttttgaagagaagcccaggccgccccttttctctccggcagagacctgaccctggaggcctcccacgagcctcctgagagctgaatttctgaggctcatgaagcccraaacccagtctctctgaccttgtacaagatgtctgtgcccagggggcctggatgtcccakggtgggtctggctgccccgggaccaccaggagggaacgtgcccaacaggcagcttagaaacagtagaagccagcggcaccgggcggggagcttctcgagggagcggagagtacaaggcccagccagttttgttgtgttgctttcaaagtgtccttcaaaggtgaaccaaattcatcccggaagcatctgacttcatctgtcaccaaagaggaccagcccgccggaagacagtgatttcccccatcaggtgtgggcattacctaaagttgctgacctcctagaatttttgtgacgctctctaattctagcaatttagctcaaatcctaccattctgactgtcctgtagtgactgttacggtgacagcttgggaaatggaggcaggaaggggcgtgagctccgttccttggggaaggtgtgggtttcgcctctgtgagaaaggagatggctccagggagctatccccagcattggagaggtggttccagcggcctccagcatagcagagatgtggccccggctgcctcccacatggcagagaagtgggccggcagcctcacgtgtggcagagggctggccccagaagcctcccctatggcggagatgtggcccccgaggcctcccgcgtggcagtggggtggccccggaggcctcctgcatggcagttgggtggccccagaggccttcagagcacacatcttccccgcatagcccagcagggctgcatgcctgggagctgggctccatgtggcttctcatggtgggaaatctgccttctaggcccttcctaggggtgacgactaagaggtcgtgggggactctttggagcttggggactgctccagccccgtggaggcctgtggagagctcctccctaaaccaggatgggttctggtcacgttggttgatggcacacttctcccagggtctccagacagcagtgtcttgccaaggaggctgaaagcttcctgtactttctttttttttttttttttttttttttgagatggagtctcattctgtttcccaggctggagtgcagtggtgcaatctcagctcactgcaacctccgcctcccaggttcaagtgaatctcctgcctcagcctccccagtagctgggactacaggctcatgctaccacacctggctacttttttgtacttttagtagagacggagtttcaccatgttagccgggatgatctcgatctcctgacctcgtgatccgcccgcctcagcctcccaaagtgctgggattacaggcrtgagccaccgcgcccagcctcttccctgctttttactggttcttctcttctttggcagaactctgtttgaacactgggatttgcgaatggcagagaggctgggtctggcttgtgtcggcctccaggccccggctgcgtggttcccaggggacccggtgctggctccccattgtccagacctccaggcctgtcagtgtcttggggacgtcgatgttgccagcagcttttatccactgggggtgcagaggtgtgrgggagatgccaagaggggaacagcccaccccagcccttggcagcttggacggggcccccaggtgcctcccccagccatgagcacaaatgaagtccgagggaaagatggggctgggctcacccagccaccaccccaggggacccagatggcaccagctcaaacaccaccccgtctcccacagagcaggtgttcagggtgtcccagggaggccccggtcagtgtgaaatgcatgtccttgtcctccaggtcacggccactctcctctgcctctctctctgtggggtcgcctacaagacatgaaggacaaggagagaagcaggacgtgaggcccaggggctctcctggccccctagactgtggggaagccccctgcccgccctgcccactggggtgacccaggcacagcaacagctgggagtccacgcgccccccaggcccaccggctgctgcgccagactttctatggcatcttcagatgtcactcccagcagaggccagaccccctcctgtcgcagtttccatcaaggtggggcctggaggccacggatgagcccccttgctcacctgatccccgacaccccagaggggttgtgggcatccactggcacgcgggggtcataagtggcatccaagtgggtttcccacgaattgcttccagaagagccagtcccgggcagccacccccgcgtcccccgccgcacccgcgtccgcctcccgggcagccacccccgcgtcccccgccgcacccgcgtccgcctcccgggcagccacccccgcgtcccccgccgcacccgcgtccgcctcccgggcagccacccccgcgtcccccgccgcacctgtgtccgcctcctgcccctcaagctgtcccaggctcagtggcttcctcaggccatgggacctacagctgacactggcactctgtgtgcggtggtgcagacagcactgtgggatgtgccagagctgctccctgcacttcccacagtgggcactgagctctgggcactgggcaggcaaggccaaagccgctggaatgtgccacccacctgatgatgaaaccacagcaggctgaggttctgtgagtcttacgcgtttttaaatgtggctgtttctcttctaaatgttaccgctgccacatgaattcatgtttccaaacacattgcaatgagagggtgctttctgcacggatgtggcctggtgtggccctcaccggcagcgcctcaccgtcctctatctctggggaccatagtgaggctcctgagagtgggagcgagccyggtcctcaccccgtcaccaactacctggggacagccactctgtgcttccagcctcaagggactcacgctgtggacaagcccagtttccagtgccatccacagctgggacagtgcccaggagtgctttgtgaatgggacgaagatcacagcaaatgassccacctctgggggcttttcccagaagtacaataaataatcttccttcttagacttcatggtccttaaactttataacaattcagatacttaggcagtttttcaaaacatgttgatttaaataaatactgaactagcactaaatgctggtgagaaaaccagcaagactaaagccaggatacgtgaacggtacctgtggggccctaggtgctagtcctggttaatattacctgtgccgttccccgtgtggtttgtgtgagcagggagaaccccacgcagggctggcccgagggcctgggatccaccccacagcaaaagcgctcagccagctgaagcccttggcgcgcactcggagtgcggctaacgctcgtgccccacagggggcagaggaggccaaacagcaggggcctggcacttgcacgggaccatctctcctgggagcagcagcacccagagccggcccagggggtccctgcagccatccccacccggccctcccaccctgctacccaggtgagcaggctggtgaacacgcacacaaaaaaaaccagtgattatgaactccaggaaaacctccgctgttgtgcagaagggaaaacgcaggcttcagctgggccccctgcgcgtctcagctcccagccgggcgtggcagctgctagactgtgtacctggaaaggatcgcgattcttctcccctcccgccatgcttcccaggccggccccatgcccatctctgagcaggctcccccttggtgtgctgtgcccacggtctccgtctctgccctctgcccaccgtctgcagaaagcagggaccctggtcctgggagaagcttccctccatgtctgtccagtgtagactgttcagatttcagcagagaccaggtttgcggatggcacccaggcaggtcgcaggcgctctggtcctggggaggcctgcccgcgagtgctggctctagtctgggagtggggccggcctggggcccctctgagccctgccccaggctccaaggccttttccaccaccccctttcatcctcgggggcgatttcgttttggagcaccgtggtctgttttcactcagtggctttggggttggggggacccgcggcagctgtggatccaccgtcaccatagagtgtggatttacaccactggccttggcgccccagacagggcaggccgcaccccggtgcaagcctgtggggcggggcgtgtccccacgtgggcccgggttatcctgctccatgccagagcccctgtggagagcctgtgctggctgcttctcggtgttcggtcagccttctcgccgctgtgccaacattctggaaacacacacacagctttgttcaactcctatgacgacgcgatgaaacagcggctgtaacagccgttacaagtggaaaaatggaaactgaagagaccgcgtgacctcagccgcctggacagagggcctcggctccctctgctctcctctccagccccactgctcacctggccactggggaggggcgcgtttcctcagagaaacagctgcccacccatttgaacaagtccaaaaatatcttgaccttattacttgtccaggccccctgggcccctatgtcgccccacacgatgggttcatttccttccattagctgcagagaggccgggtgtggggtcagggtttgcggtgaaatgtcgagacccagggggccctcggtttgcactgccacgggatcagctcagcccctgcccgtttcatacgggatcagcccagcccctgcccgtttcatacgggatcagcccagcccctgcccgtttcatatgggatcagcccagcccctgcccgtttcatgggtcagttgctcttcaagccctttgtggagaggagggtcaggccgagcgggatagggctttctctccagcgctgaggctgaggctgaggtggttcctgcagggcaggaaggttcccgcagccacagcttttgcaggtgaggctggacccagccctgagccttgtgggcgctgctgcaggtcggcatcttgctaggagcacctcctccagtgtgaagcagcaaacgagccccgggtgaaggttcgaggggctgctgaaccgcccccctaatccgtcactgtgcagatgctgagaccccagaggtgggggcaggccccccacttggcctcctgagacctagttggtgcctttccaactaggccaggctgactcacgagctgctctgggccagaagccacgtggtaagattggtccctggcctaacgttgagctgcctgtgccctgcccacaagcagaatttaggaatagtccctggaagcagaactaaacacacccatcccagcttccttctcctcctctgcacttacaccatgagtgtctctaccttgagagacttaaactccaaccatgtgggaaatgtttcagccactcatcctgaatttactcctgtgggacagcagctgcgctctgcttgaaagagtaagagatggaatatcctccattcaaccagcctcccagccctctggaaagacacctgccttcctggtttcacttttcttcttgaatgaaaacagggcagtgttcaagcctcagagggcctggagcaaagatgaaatgtgaacagcctccggaggaaatcactcaaaagtagggtcatacgaatccacatgggaaagtccctgttccgagtaagtgggagtggggcgggaggctgaatccaggacccacaggtgggacaggccttcctgccagggcgtcttctctgctgtttcaagagggctcctggaatcttgtttactgccatacttttctttgcagaactttttatagccaggatcggtcaactttagtatggactccgctggcccctgcatgctcagaattagtggagttcttagtaagatgacttcatactagattaaataagcacaaggtaatgttcaggattgtgggctgtcagctcctcttgggccagcagtgccgaggaacatcaggctcagacatgcgttcgatgaaccttcctaggtatggatggacgtatgtcccaggctgtgtggtgaggaccctcccggtgtgctgtgcatgggagtgtccattgtgcattacatattcagatgggaacgtgagtaacaggccacgtgtcacagcaccgccaaggcaggtgtattcgtctgttctcacgctgctaataaagacacacccaagactgggtaatttatgaaggaaagaggtttaatggactcacagttctgcagggctgaggaggcctcaggaaacttacaatcacagcagaaggggaagcaaacatgttcttcttcacgtggcggcagcaaggagaagtgccgagcaaagggggaaaagcccatgataaaaccgtcagatcttgtgagaactcggtcactatcatgagaacagcatggggtatccacccctgtgatgcaattacctcccaccaggtcactcccccaacatgtggggattatgggacaattcaagatgagatttgggtggggacacagtcagaccatgttagccagccagcaccgagtgcactcaaggctccccgagtcaagcagccagcacattctgtcatcccagcgcctctactatttaaggaaagagagcaaagcctttattttcattgtccattttcctctgattcctctttccaaactgggcatttttgtgctggaaagaaatcctgaatgttgatgcgatgctgtgtgatcatctcttgggtagtcattttccaaataatttcttggagtaccgacactcgtcgttctttcagggacccctgggggcagttggtatattatacatgtatgagtttttagatggctcctctctctcaggttatttctgctgtttctgttaagattatagacaacataactgggatgtgtgatttcataggttgaccctgatcagcttcccatgcctggatgatcagtaagaagccctggaccccctctgtggagggcgggctgcagctcctacccttagagctgattcaccgttttcagatactggggccaaaccggccctcccagacgcctgctggaaccgattccgcctggcactgcatgcatcccaacccggggccccattaattctcggatgcctgagtccagacccacttagcgtggttgactggagcctgtgccagggctgagctcatgagctgaattcttacatgaacaaattacttgcagtttggtctgtggctttgcactgcacacctctgtggccgcccctcagcatggggtctacggtcctgtgcagagcaggcgaggcctgggtaagccatcagggcaaatccacccacacctttggcaaagccagcccaggtctattccctagggacagtgaaagagatagcataggcgaggccatacctgtgtgcccgcacctgggaacctactcccgtctgtggcaagcttggaggacagtggtggctgaaaatgcaggaagcttctcaggcatatgggcatctgcctgaagctgctgtgtgggcatttcacatccacccctgaaagcccagaaagggctgacagctgctgccaaagtcagtggggtgtggtttgccacagaagtcagcgacagcagtgggatgtgatttggagctggctgggaggctggggcagggtattgaggctgaagtaatatacgttttgggtactgtgaagtcagatgacttgataaagatgcagaaataacgatttgactgagggcaagaaagcaacctgggaggaagctgggtcagcttgtcctcagtcaggaagcttccgccatgcaccatccaggagctctcccagctgcacgcttcatactcgaacttgtatgagatgggaacccatgacaataaaaccaggctctctgggatagtattgaaaaagtggaagttttcttagtacagattcatctcaccttgaagtctgagagcagacccagaagaattgattgcagtggtcgagtctggcctgattcgatggtgtttgctgcatttgctgggaccagaagaagggcacgcatgttgtaagcactgtcctcaaagagacttgacatcaacaacttggcacagggagggttaactgtgtgttattctgaaaatatgttttggtccggacatgtccaggcggtaatgtagcagaccctccactttgaggagatgataataacactagcccatgtgtaatatatcaaatcaaaagcagccgtggacctgggaaggacagacttttcatcaaaaggcctggtgctgtggggtcagggctgtggcagggcagtgctctggccataggaccgcaagcactaccacagccaggcgaagggagcccttgtcttgttccgcagaggggagtgagcatggctagaaggagccgcatgtgggtgacgtgggtgtgagtggaccaggatgtggggtgattgtggccgtgagcggcaggaggccagagaaggtttggcctggagctgcctggctcaggggctgcccactgcctcggtgggggtggtgagagttcaggtgtgcactgaggagagaagtgaaaccgacctttggttagtgagtattctgtcctgattgatctgtggggacccgcggggcagctcatcacggatgaggcagagaaagcgagtttggagagctcgtccaccttggcccgggggcacatgcaagcaacagtgtcaagtgctctctccgtgctgggtgtggccccatcatgcattccaacatagggaatacccgtgaccaccctgcgaaatgggtgaagccccattgtgcaaacagggaaactgaggcacagaggaaggcagtcccttgtccaggggcctctcacggtgaaggcgtgcagagccagtactggaagccagcaagagggctgctgtatgcctgacttggctgccacggtctgcaccatgtcgagctgcctgtggggacaagcgaacttcagttgctctgggccgtgttccgccatctgatccagcagcacggcccctccgccagccaagcctccttcacactcctgaggcctcgctgagcagccgccaccccttatataaactgacagatatggctggatgcttcgacgtcacctaaagcttcaccttcagagtgtgcactatcccatcctatttcaggtgttagctgggagtgggaaggccgtgtgtaaggagcaaggggagcgagcaaatgccttgctctgaggaacgtccttgtgctggaggtagaccaggaggacacacggcccagaggctaattctttaatagtagagatacgtggtgggatcataaacaaagacagtttcacgggcttttgctcgtcactagtgagccctaattataaagtatcgaatcagaattcaactagccaagccatcatcaaaaactcatagcagttcatcaataagtgtgtaaaatcctactctccatggacattgtggaccttgggaactggggtcagcatttttattaacccgtgtggacacagcagtctgagagttttccattcctcgagggctgcttgcggcgtgttgtacgtcgatggtatcagtggcgtcccagccctgcttgggaggacacacactgctcattttcagcaaccagggagaatgaaatcacccagcactcttcctcaggctgatgacctcggggtgccctgggtgacccagccatagggtgagcattcaggccacagcgccttccccagaccctcaggacccctcatcaggacatccttctggccggggcccctcaccccagctcgtcctggccagagtctagggtcagcctttgtgcttcggagactcctgcagcagggtgagaagcaagttatttagacagagaaggcaagcaccggagacagcctgccgcccccaccctccgtcgccctgctggggacaacgtggagggcactggcctgaggagggaatttgggggttcctgctgcctgtcaggatgtggagcacagtgcagcagtgtgtggtgaggggcagcgggtgggcggtcattctggcagcctgcagggtcccaggaaacacggtcttctttggtcagatgagaagcaaggccttgctcagcacaagcgaccagcacgtgacctttcacctcaggtcaccaagagtagcaacagttaggcctcctccaccgagcacatgccttgctgaccttgcccagggaagcctggcagccagggcggggctcccatggcaaggaggcagccctcctccaggagataagccgtgtccagcatcctcaatgtagcgctactacctctatatgtaaggcctgcacctggtgacctaagtcaggttttgcttctaggtggcatttgcttgagggtcccaagaccccagggagggcactgtctgaagaccccggcacaacccctcagagaacacggccacctggctgtgagcggagctctgcttgagcgctgtggcccgtttccagcataaagcaggaagttcctgggacttgagctgagcactgtgtggcttcatcattgttttcagaatgtggtctgtccagagagcagtggcataggaagacattgacttgttgcatatgtgggcattcagcgcctgtattcacgtggacatgtttatgtgggcattcggcggcacctgtattcacgtggacatgtttatgtgggcattcggcacccgtattcacgtggacatgtttacgtgggcattcggcacctgtattcasgtggacatgtttacatgggcgttcagtgcatgtattcacatggacatgtttacgtgggcatccagtgcctgtattcatgtgtacatgtctacataggcattcgatacctgtattcacatgtacatgtttatgtggacattcaacacctgaatgcacatgtatgtgggcatccaacacctgtattcacatgtacatgtttacataggcattcgatacctgtattcacgtgtacatgtttacatgggcacccaacacctgtattcattcacctgtgtacatgtttacgtgggcatttgatgcctgtattcacatgtacgtgggcattcaacacctgtattcacgtggacatgtttacgtgggcattcaacaactgtaatcacatgtacgtgggcatttgatgcctgtattcacatgtacatgtttacgtgggcattcgacacctgtattcacatgtacttgggcattcgacgcctgcattcacgtggacatgtttagtcgtcagcctgagccatgcaggcggagcgttggcttttgagaaggtcagttgccttcctcacttcctagcctgtccccagggaggaaaacagggagtctgtgtgttcttggagctctggtgtcaccgcggagtttgctgtgctcactttagactctggttctgtaacttttaattccttcagtggttcctgtctgaattggtttttgctctcgtttggtttgaattggggtatttttttttttttttttgctgtggtgtaaagatttttctaaaggtcctttaatgttatacaagtcaattatgcatcaatattatggattaaaccattttcctcagcagtggttgaaagaaactagcttttcagcagacatcttattctggtggatctttcagtgcttttaaagtaaataacaataaagaaattttcatttctatttcaaagttttactgtaggcattgcatrcagactgattataaatgagcgagcctgcccttcccactgggatgtgaagttcgctgaattatgtcagcagcccaggaatgactgctgtgcctaagcacaccttctggccctagctctgaatccacatgtgtgagaggagcatgcatgtccctgatgcagcgggactgccctttcatagtgtccgggggacaggacatgacaggcaggatctgccagagccttgctgcatccctgagcttagcagtgtggggcactgcgtgtcctccggcatcaggaaggctgcgtccctgagcttagcagtgtggggcactgcgtgtcctccggcatcaagaaggctgcatccctgagcttagcagtgtggggcactgcgtgtcctccggcatcaggaaggctgcgtccctgagcttagcagtgtggggcactgcgtgtcctctggcatcaggaagtcacagtgcatggccccttctgtaactcagcgaccgacatgggcgtgtttccaattccacttgtatgtgtttcttgtgtatctaacaagaatttgtggatctgtttgaatgtgaaaaaaatgcaagcattctctaaaattgaattgtgtgtggagaaaatgatactgaggataaaagtgttgaaaagagaacaggaaaagcggagaaagaaaatgagggaaaggaagagaggaggaaaagagggaaagccacagcaccagaggaggggagtggagaggtagggaggaggaggagagggaagaggaggagagggaagaggaggagagggaggaggagaaggagaagatggaggaggaggagagggaagaggaagaggagaggaaggacgaggagaagagcgaggaggagggggagaaggaggaggagatggaggaggagagggaggaggaggagagggaggaggaggagagggaggaggaagagagggaggagagggaggaggaagtggaggaggaaagggaggaggagagggaggaagaggaggaggaaaggtaggaggagagggaggagagagcatgaggagagggaggaggagagggaggcggaggagagggaggcaggaggagggaggagcagaggagggaggaagagaggaggaaaagagggaaagccacagcaccagaggaggggagtggagaggtagggaggaggagagaggaggagagggagaagaagagggaggaggagagggagaaggagagagaggaggagagggagaaggagagagaggagagggagaaggagagggaggaggagagggagaaggagagggaggaggagagggagaaggagagggaggaggaggagagtgaggaagaggagagacagaggagggaggaagaggaggaggaggaggagatggaggaggaggagagtgaggaagaagagagaggagggaggaagaggagaaggaggaggaggagatggaggaggaggagagggaggaagaggagagggagaaggaggacagggaggaggtgaagaggaagaggagggaggaggagagggagaggagggaggaagatgagaaggaggaggaggagatggaggaggagagggaggaagtgaaggagagggagaaggaggacagggaggaggtgaaaaaggagaggagggaggaggagagggaggaggtgaaaaaggagaggagagaggaggtggagaggagggaggaagagaagagggaggaagaggaggaggagagggaggaggtgacgccccctccgcctcactccttgcccacctccgagtacacagctggctgcggctatccccccgggcccagcccacctatgcacacctctgagtctgcattttgcggcggtctcctcactgaccatccctatagcatcacagagacagcggcgttactgtaggtcatgaacagaaacggctcaaacaactcaagaaacacagttctggccacgccaggcttacttggtgagcagatgccctgtgaggaacccagcctgcaggcctgcgggggacaccatgacccgggcctggggcaggaaaccctggatgccccagcaggtaccccagggcgtggagcttccgtccaggctccgtcctgcccttgtgtggggactgccccgaggctgcgcccgcctcagccccacacccaggcttgctgtcctgggcgactccctgcatgtgagcgccggctcccgaggacgaagccttcccagcgctgctgtgtccccatgtgccccgggcgtgctccacgctcctctcctcgaggcatcgagtcctgtattcaggaagcttctcacgctgccgcctccgccctgtgggttgaactgcaagggtttgttttccttccatccctcggccctgtccatgctggttgcaccttcactgtccccgttatgcctatgggagaatagggactgcccagacccagcagggtgaggtgaggtagcctggccactgcggctcatgaatttgggtggaaactggggtcctgtggatttctgtccctctaaagagcagctcatatgacagtagctgccgcagacccgaagggtgagagcgagtggttgccacacacggcgtcctgcagagtggcgccatcttcccaagtcacatctgagcctacactgccgtgacrgagtgaggcgttccgagactgttcgcgttttcatgaaacgtttctccttcctgaggactgagggactccctggcatgtggacgttttcaggccctcagactctgctsacagcagttaggaygcaaggccaccttctcatcttccctgactttgctttcattgtgtcactgttctcatcaagaactttcagagactctggcatgtaagtagcagaagaagagaccatgttccttgaccagttattatttcaggccttttacctccactctgacttgtcctcatggttcctctagaggaagcctcccccgtcrgactggtcctctcatctttggaagcctccccactcggactggtcccctcatcttgggcagatttctacttcccattgttgactcgaagacctcccctgtcgggcgtgccctctgctgtaccatgaggctgagtcactctggggtcctggatccagcccaaggccagcttcctaaccccttaaccgcagttacagctctgagcccygagcccacttttgccgacactgtcaccctccacgcacactgtcttgtgcacatgagccggtgtgtggtctcacaacctagattatgaactgcgtgcagagatggggggcttaccattttcttaaactcactgcagctcaacttccagtgaaatcttggttgggaagaataatattgacgtggtttatcccttctaaaccctcgcaggcccaccctaggattcaccaggcttgacaggcatgatgcccaggccatgctgggctcctgcatagccatttttacttggcctgaggccagcaaccctaggcattcccttgccctgttgtataaagacatcatggaggatggtgcatattctattcagcgcatctctgtgaggactcctggaacatttcttttttaatttaagaatagctatgattttcaaaaaatagattgtctgtttttgtcatatagacattgtggatcctgttcctctcttccccgtggcagctagggagctcacagccccatccgtagccagctcctagtaagtaggtccgtgtcatgggttttgcatactaacctcattctaggctccaacttatttcccattcttgttttccctatgttttctttttgtcacctctttttaaatatgtgtttactttgctaacttgtatgcatctttctggaatgaagtgaggtataaatgaaaaagcaaattacttagtgctctgtatgacacttaggatgtgctgtgtagagctctcagttggagtttattgattcattcaccaactgacttcaacttggatcagtccagttattgttaccatcatcacaaagagtccagaactggatgaggcggacacaagccccaccaaccaggacctgggggytgaggttcgggaacaaagacaccaaygggcagagaaattgaggctgaggaagatacagctccaaggaacagaggcaacacagacagagggaggcactgggccaaagtctgggtgagagggccctgggcttgggtgggaggtacagcaagccgcctggccccacagcccactacatctttgtgaagctgatgttgagtgcataggggcccctggccctcgcagcgggctgatggagaaaactgagcacgggctcttctccccagatgaagacacgggtggtgctgggaagaggcaggtgggcttgagcaaaggcgtctgtggggactgcagagctcgtcagggtaagagtcccacgcattgtaagaacaggttttcatctcctggaggttgggagccgcctctctcctgtttgttttctaggcatgactcccactcacagaaggggctgtgcttggtttgtgcttctaatgtccgcgtagagctaaacctcagctaaaggccagccggagcatgaccaaggaggcttgtcctgaagagagaggggtcagaaaagcggaggtggaggacccctgcctccgtctgctgcgagtgcctagaacgaggtcctcrcgatgagctgctggttggaaactgtagcatcttgatggtcccagcactgaggatgatgtgtggacatctgtgcaaggcaccttctcacccaggcctggatccagttctgggagttctgggaagctggttgtatcactgcccatttacaggggagcaggcggcccaggaagaccccgccagtacccagtgtacacccggagtcggcatgcagcctggaccatatcacccaggcctccagctccacggctccargccacaccctggacasscacccgtggcctagcagcacatgggacctcgcacaaaggagctggggcgcagaggccagagaagaaagaagatgcaaaagcgaccaaagactcaatgtgtttacgtgtttgttcaaaaagatgttctcccaccccccacaggggtccccccagacccggccaagagacccaacgctgagacccaaygccgagagcctcgtgtgtcctctggggtcgccctgggtgccagctccacctgattcatcctagagagagtgtggagctgaggccgcccgcagcaggattcgcccaggtcacagtcgttcacaggcggttccgggagcaggagctgcacctggatcaggggcctctttccacttcctgccccaggtctctgggcagcactgagcaggactctgctgggctcacactgcagccaccatggtctgcgggccagggctctcacaaactgtgtttgtgtctatgtgtgtctctgtttgtgtctgtgtatctgtgtgtgtctgtgtctgtgtgtatgtgtgtgtgtgtatgtctgtgtgtatgtgtgtgtctgtgtctatgtgtgtctgtatgtctgtgtgtttgtgtgtctgtgtatgtctgtatgggtgtctgtgtgcgtctgtgtctgtgtgtatgtgtgtgtgtctgtgtctatgtgtgtctctgtgtatgtatgtgtgtctgtgtctgtgtatgtctgtgcctgtgtgtgtgtttgtgtctgtgtgtgtgtctgtctgtgtatgtgtatgtctgtgtgtgtgtatccatgtgtgtgtttgtgtctgtgttctgtgtgtgtatctgtgtgtatttctatgtgtgggtgtctgtgcatctgtgtgtgcgtgtgtctgtgtatgtatctgtgtgtgttcatgtgtgtccgtgtgtatgtgtgtgtgtctgtctgtatgtgtgtctttgtatgtgtctgtgtgtgtctctgtgtgtttgtctgtgtgtgtttgtgtctgtgtctgtgtgtgttcatgtgtgcctgtgtctccgtgtgtgtctgtttgtgtcttgtgtctgtgtgtttctgtgtctgtgtctgtgtgtttgtgtctgtgtctgtgagtgtgtgtctgtgtctgcatgtgtgtctgtttgtgtctgtatctgcgtctgtttgtgcgtctgtgtgtgttcgtgtgtgtctgtgtgtttgtgtgtctgcrtgtgtgtctgtgtgtttgtgtgtctctgactgtgtgtgtgcactgccctttgcactgctttgccagcacattttccctgtgccgtgtgtgtctttctcctccactcagttgtaagctccctgagggcaggggctgtgtctcactgctctgtggagtcccagatccagcactctgcacccgtgacatggtgggtggctgttaaattgagttggcaaagaggtgtcagtgtcagctgctgcaagccacagaagggcatgaactggcagcaggtgggattagttttatatcagagatggagacagggaatgggggggcaggtaccccaggaatctatatctgcatagcaaattatcccaaattggagagccctgttttgctctcagctctataatctggtcaggcatgacagggaagtcttgtttctgctccactggcatcagctggagtggtccaagggggctggagggctcgccccaaagagggcttgtctacatagctggcacattgtggtggcagttgtggagctcagccagggctgtggctgggagctctgggcctctgcatgkggagcctccacaaggctgcttgggcttcctcacagaatggcagcgagtttcccaagaacaagtgtcccaagagaggaaatgggagctgccagtctctcgagtctgagcccagaagccagaaactggcagggcgttacttctgctgcctcaaccggccaagcgggcccacagcccccgcactcaggtggggaggacagaggtctcacctcgggggcaggtgcattctgctgcctcaactggccaagcgggcccacagcccccacactcaggtggggaggacagaggtctcacctcgggggcaagtgcgtcagagaatgtgtggccctcttcagcacacccagcaatgaatctgaatgcaggcgcctcatgaccttgctgtgtctggagctggctgaacgctcttcccgaggatgtcygtctacccgagctggagggatgtattagaggatacgaaggaagatttgatgcttttttcagatctgctctgtcattgggcaaaataagctcccctatagcgctaatttttaacaaagatttctccccaaaggagagagtaggatcaygtatttggaaaagctcacataccattgaatgaaaatgaaaagaaattagcttcacgcrttcataattcctacattctctgggtgcacagggcctgacaacagcagaaagcctccggtttaacgtaaagaggtgggacctgctgagaccctcacctcagaaagtgcttaattgaaaatccagtttctccacatgmtgctgctaagaatatttaattagcgttatcattaagcaagggtagttgttatactgacatcatgcattctgtgactgacacacttaaaccagcagaaacctccagtcatattctatctacataaactctgctctgaagctaagcatggttccaatatgttcctgaaattaaattcactggattaaacaaatagaattaagggtgccagaatttcatctctaaattgcagagcagtgttctagaagcagaagcagcattcaccggggccggtggcagcgggaagtgaaagtgctggggaggctcggagaccaaggaagccacagagaaccccaggccggacgggctgctggggccaagcgtggatgcggtagccgaggtcggggtgtgtatcctaaagcccagtaagccatgatgcctgcaccagaggccacagccccacatgtgctttcaggccatctgccgggtcttgggaagaayaaagtgtgcaaaggggcgggtggcagggaggggcccatggcagcccccagggaatccaggtgaggagcgcctgggatagtgttttagatgtgaagcctgcaggtctgggagggagctgtggtggagtgggaggcaggaacgcgctgagccacagggagctgcggaagagagttccgtgtggaggggctggtgacatgtctgctgtgctgttacaaatcctggtgaagatgtgtgggtgtgttttatgcaggaccaagggagcccgtggcgtggctaaagccaagcccaacatcttctacccaaggcctgcagaaggtctggggtgtatcagcaacccatactgtcttcagtggagttgtggtggctgaattccaaaatcctatctgtgttccatttgcctgttgacattgctgtgatgtttccataggtgcttagtcaacctgtcacacctagaagtcaatacaccttccttaactgcccccccgacaatgaggggagtcatccagggaaggggtgtggaattccagcagggcgagctggttgccggcagctcattagctgtggcctctcagattagcagtaattaaactgtgaaatcagaccagcgccttaagcctggatgccgtcgggagtggcctggggataaatcaccggcatgtgttggtccttgcttggcacgggcaaagcgtgtggggggcggaataatgaggacattcaaccgctgccctcggtggacacygggctggccgcggtggaggcgttgtcatgacgatggctgggtgcaggcaaacgctcctcccgttcgctgtggttaatgaagatgatcatgaaaaattatgccaacattacggccatatttttatgctgactggcacgtgcaacctgatgccagcgtcagcacacagcggtgacagtaattatgtgttgacaaatgaggggacaatgtgaggaaatgtctgactcagagatgtgtgtgtcgacttcgccgagtaacttcttccgagggcatgtttgttctttaaagcctccataggtgccatggcactgtgggtgccaaaacaccccaatcacttgtccttattttctaaagaaagacactacaattaaagcagaaactgctcccctaagcagaatggatgagatcgagataaatcaatgttttttatattttaaggaaatcagtgtgatttccaaatgatttttccaaatgacttttcttgtggggtgatgtgtttaggtttttttgtaactgattttgtttctgaacagaaacatctggggtggagctggggctgggctggggcgtcgcagcccccttggcctctccaggagctggggagcctcacgtcatccccatcatggctccttgaagacaagtgttgcggccgcgtgctctcatggccgggatatgggaacgggaggccagcgtggggcgtccggcccggagccacactctgtcactgtaggggggtcgcttcttggccccaaagcaaagcctgaggatgtagcgtgcggttctgcccgtgtgctgtgcttcagtgaacacactcagatcgcacagccgaacgcagatgagctgctcggaggagcagaggacgatccgttgactgtaaaacaggcttgctgggcctcactctctctgcatctcctgtgctctggatttgatattccagcaatctggggaattcatagccacaaatataggttgcagtcttgttagtgaaatctttttttattgattttgttaaacaaagatgcttaagtagttgcaatctgaagtagagtttgtctttccagtttgttcttgtttttacygtttggaagatcaatattagtcgccacactgcagagtgtgtgactcacagtggcaattctctttttaccgctcggtgtcagcaataagcaggaatcgtgtatggaagcgtcccatgactgtgccttcatgtccttaatgtccctcaagcgggctttcttgcctcctaagtcctacctgccttttgagtttaaaaacaataacaaaacaaacaaacaaaaaatagcaaggagcacagagctggaagtttctgcttcagctggggcctggctctgctccaggtctgagcctggcaggccttgccaggaccactggttcccaccgcctccacacacacacagcgtttctaagaggagcaggagtatagacagttctcaccacactgcagaggcacagcaccaaacagaacagtgttcgcctgtgaccacggaaggcagactggcctggcagtgaaagagcggtcgccctggccagttgctgacttgcacccatgggcactcacttccccaatgcagtgtttcctgggagagcaggagcattcttactgctgtattcgtgagcattcttactgcagggtgtgactgtgaggacttcccagccatttgtacgcaaaggcaaacaccgtacaaagtgtcaggcatcattatcaaggtagaaggagagagaaagattgggttatcctaagaacacagataacatggcagtcagtctcattgtaaaaccaagatgccaggaggaacagggaaacccctccttcttgttcagaagcttccgtggtccccttaaattggtagggtccaaggataaatctggtacaaggcgttcataagccacagatggatgatggacgtggagtgctgtgtgcccrgcacagcctggctacttcatgtcaacctccctgcagccagggaagctcagtaccttgcccagagctcctcatctacactgcaagtgccaggatttgaatcaagacgtgccaaggcctggcccctaccctgcagggggagctgtggcaatggcagcccctggagtgactattgtatggtgctaggtggtgccaggaggagggctggcagtgtccagagggggacaagccactcccagctgggtcatcagacaggattccacccacccggcaagagccagtgctgagagctggccaggaagacagagacataagcccagaaaagaccatttctggtgccatcaactacaagtagagggtgaaggccccaacggaggtagccaaggggacgtgtttcgagagccacctgcaaagtggccctgtgtctcacccagcctctgagatttcaatgtcctgtcctccaagaaatggtgtctcagccaaatgctatggagcattgagcaagttcttgcagttctgggtaccttagtgtctcctccataaactggggaaaagaataggacccgcagcacaggcatttgtgaggaacacccaagtcatccaaacacactctgcaagtgccagcaattctctaggatagaagctctgagaatagctttttctgattcctcccgtgtctcttcagtgaaagtgtttgtttatgggtggatcaatggatggatggaggaaggatgggtggatagatggatggaggaaagaaggatggatgcatggatggatggatggatggtttggttgacagatgagggatggtggttggatggaagaagagtggatgatggatgggtagatggatgatggatggatggatgaaggaaggatggatgggtggatggatgtaagaagaatggatgatggatgtgtgggtgaatggatggaaggatggatggatggaggaaggatggatggttggatggatggatgggtgtgtgggtggatggatggatggatggatggatggattggtggacagatgggggatggtggatggatggaagaagagtggatgatggataagtagatggatgatggatggatgaatggaagaagaatggatgatggatgggtgggcggatagatggatggatggatggaggaaggatgaatggttggttggatggatgggtggatgaaggaaggatggatggttggatggatggatgggtgtgtgggtggatgaaagaaggatggatggatgggtgaagggtggatggatggaggaagaatggatgatggatggatgggtgggtggatggatggatggatggagtaatgatggatggatggatggatgagtggatgagtggatggatggaggaagaatggatgatggatgggtgagtgaatggatggaggaaggatggatggatgagtgggagtttgggtggatgaaagaaggatggatggatgggtgaagggtgaatggatgaagaatggatgatggatgggtggatgggtatgtgggtggatgaaagaaggatggatggatgggtgaagggtggacggatggaggaagaatggatgatggatgggtaggtgggtggatggatggagcaatgatggatggatggatgagtggatgggtggatggaggaaaaatggatgatggatgatggatgggtgggtgaatggatggaggaaggatggatggatgggtgggtgtgtgggtggatgaaagaaggatggatggatgggtgaagggtggacagatggaggaagaatggatgatggatgggttgtacggatgagggatggtggatagatggaagaagagtggatgatggatgggtgaaaggatgatggatgggtggatggatgatggagggatggatgaaggaaagatggatggatggttggatgggtggatgaatggaggaagaatggatgatgaatgacaggtgggtgggtggatgaaagaaggatggatggatgggtgaaggatggatgcatggaggaatgatggatggatggttggatggataaaagaaggatggatggatggatgaaggatggatggggagtgagtggatggatgggggaaggatgggtggttggatggatggaggtatggatgcatggatgatggaggaaggatggagggatggatgagtgcatgatggatggatggatggaagaatgatggatggttggatggatgaaagtggatgggtagatggatgggtgggtgggtggatggatggatatggatggatggatatggatggatcaatggatggatggatgggtagatggatgggtggatgaaggatggaaggatggatgagtgcttgatggatggatggatgaatggcaggatggatcatttcccagctgtaggacagacaatcggctcctgtcccctgctgtatgccaggcacgcagtctctcactcttttattttttaattttttattgtggtaaaatatataacatttgtgatttttaacctttaaatgtacaatttagtggtagtatttacattcaaaatactgtgcaaccatcatcactatctgcttctaaaactctttccatctttccacactggaagtctgtccccattaaacactaactccccagcccccaggacccactgtcctacattctgtctctatggatctgatgactctaaggaccccatacgagtggaatcacacagtgtttatcatattgtgactggcttatttcacttagcataacatcttcaaggttcatccatgttgtarcctgcatccaaaatctctgccttttcagtgctgagtaatattcccatgtgtgggtggaccacatgatgtttatcttttcttccattggtggacrcttgggtggcctcacctcttggcttctgtgagcgctgctgctatgaacatgggcgtgcgaatctctctctgagtcactgcattcggtgcttttgggcatatgcccctggtggaactgctgggtcctgggctgattctgtggttagttttttgaggacccactaacagygactgcatcatgctatattcctccctgcagagtgtgccagttacgattcctcagcattctcgccagcacgtttttgttgtgtgtgtgtgtttagttacggccatcctagagggtgcgtgcatggcctctcctagcctccacatgctccactcatgtggctgcgactaaagcttccctgtgttcacggacatcatgaagatcaaacgaacatgagagtgtttggaaaatggtcacaggttagactgaatatgaggtgttgttgcttctctgaaaacaaaaggtgggcaccgtggtgctctgggggatggggcagccacatggggcagtggccacacagcagaggcccagcagcccctaaccctgcccggtgcagcctcctcctaccactgccggggctctcctgccctcaggagactccrgcaagtgactgcactgcgaagagaggaccagccaccagccctcagcatccaagggaggaattaattccgaatgaagaggaaaccaagcagtgaggcaggctaagatttccagaagaatttaatctgcagtcaggttaggggcgtggccttcccccatggccaggggggcagctgctcccaactctgaaaaggaggtggaggctcagtgtgcagctcccctggggacccagccgagaggatccccaactgtgccgtggggtttggggctaggagaagggactcgaggccacaccagcctggctcagggccaccgccaacctgtgcctcagagcgaaggccgccccatggccacagtgactggggcaggctgtcttgggcctctggagagctggagtctgtgctgtcatcaccagggctgagcttttgttggaaaagggaagggagagaaaaatgaggagggcacatcacgccagaggtcatggtgtatgtggctggaaatttgagttggactggacacctcagggcatctccctctccttcccactgtggcctgggatggactctgtgcctgtgagtgggcagccatgggctctgatggagggttaaccctgtgaccgaccatgagtgggcggccgtgggctctgatggttagctctgtgaccatgagtgggcggccgtgggctctgatggagggttagccctgtgaccgactgtgagtgggcggctgtgggctctgatggagggttagccctgtgaccgaccgtgagtgggcggctgtgggctctgatggagggttagcctccggcaccagcacctgggcctaacatgcttttcaggggcggggctggattgtggctgcagggccttggacacgcagggacacacttcccaaggggggccctgatacccctccctgcatgcggtgcctggggccaccatgctcccacctctctcctttggctctgaaaagttttttcttttttctyttttttttttattattatactttaagttttagggtacatgtgcacattgtgcaggttagttacatatgtatacatgtgccatgctggtgcgctgcacccactaactcgtcatctagcattaggtatatctcccattgctatccctcccccctccccccaccccacaacagtccccagagtgtgatattccccttcctgtgtccatgtgatctcawtgttcaattcccacctatgagtgagaatatgcggtgttcggttttttgtttttgcgatagtttactgagaatgatgatttccaatttcatccatgtccctacaaaggacatgaactcatcattttttatggctgcatagtattccatggtgtatatgtgccacattttcttaatccagtctattattgttggacatttgggttggttccaaatctttgctatcgtgaataatgctgcaataaacatacgtgtgcatgtgtctttatagcagcatgatttatagtcctttgggtatatacccagtaatgggatggctgggtcaaatggtatttccagttctagatccctgaggaatcgccacactgacttccacaatggttgaactagtttgcagtcccaccaacagtgtaaaagtgttcctatttctccacaccctctccagcacctgttgtttcctgactttttaatgattgccattctaactggtgtgagatggtatctcattgtggttttgatttgcatttctctgatggccagtgatgatgagccttttttcatgtgttttttggctgcataaatgtcttcttttgagaagtgtctgttcatgttcttcgcccactttttgatggggtttttttcttgtaaatttgtttgagttcattgtagattctggatattagccctttgtcagatgagtaggttgcaaaaattttctcccattctgtaggttgcctgttcactctgatggcggtttcttttgctgtgcagaagctctttagtttaattagatcccattggtcaattttgtcttctgttgccattgcttttggcgttttagacatgaagtccttgcccatgcctatgtcctgaatggtaatgcctaggttttcttctagggtttttatggttttaggtctaatgtttaagtctttaatccatcttgaattgatttttgtataaggtgtaaggaagggatccagtttcagctttctacatatggctagccagttttcccagcaccattcattaaatagggaatcctttccccattgcttgtttttctcaggtttgtcaaagatcagatagttgtagatatgaggcattatttctgagggctctgttctgttccattgatctatatctctgttttggtaccagtaccatgctgttttggttactgtagccttgtagtatagtttgaagtcaggtagtgtgatgcctccagctttgttcttttggcttaggattgacttggcaatgtgggctcttttttgattccatatgaactttaaagtagtttttttccaattctgtgaagaaagtcattggtagcttgatggggatggcattgaatctataaattaccttgggcagtatgrccattttcacgatattgattcttcctacccatgagcatggaatgttcttccatttgtttgtatcctcttttatttccttgagcagtggtttgtagttctccttgaagaggtccttcacatcccttgtaagttggattcctaggtattttattctctttgaagcaattgtgaatgggagttcactcatgatttggctctctgtttgtctgttgttggtgtataagaatgcttggccagggcaattaggcaggagaaggaaataaagggtattcaattaattaggaaaagaggaagtcaaattgtccctgtttgcagacgacatgattgtatatctagaaaaccccattgtctcagcccaaaatctccttaagctgataagcaacttcagcaaagtctcaggatacaaaatcaatatacaaaaatcacaagcattctgaaaagttttttcttattttggatgccttgttaaaaggcaagtaccccagcaggtgtcagtggagactgtgaccgctgaatagcaatggtgatggggtgaggctggatctggccagaagagggctgaggggcatggagaagactcggggagcacagggaagatgtgggaggtggggaggatgggagggaggacagggagaggacaggaaggactggctctgctcattctccttcgcacttctgtggagcagctgctctgggcccagataatgatctctcgagggcaggacttgtggttttatttgcgtcatgagcctttargaagtttggggtcgtgcatgtagagctgaacgtggggacaccgagaacgtgcaccctgcatcccgactgctgagttcacttctctgcaaagcacaaatcgctgtcccatcctgggtcacactcctgggagccaaacctgggtgggattctgtctctaccccacatcagctgtaagatttggggcagggcgcagaaccccctgagcacgtgggaaactgatcaccacgtgggggatgtttgttagagagattcagtgggtgatgtgggggcagaaggaggcccctagarcagagtatggcatctgttctgaatgccgatatggcgttggggggacagcaccctggcggcctgcagcaccctctgtgaacagggaaggctggaaggaaggggtgggtccccctgacaggtaggggctgctggatggtcccactttgcccgcccggtctcttcctacactatggttctcactgatgttccctgggcagacaactcaggatgagcctctgtgagtgctggacttgtgttccatccagctcctccccaagagaggggcaggggctggkgccccaaagcaccagcaccccacatggactggcacattttgaaagatataacacaaagaacttccattataatcgctgcccaggcgaccattctcaacgcgtacattatttgttaaagtaatttttaaagcctcaaagtcatgagtccagaacttgcagatctgaacacsaacatcattgaccaataacagcaaccgctgaagataaaaagccaggccgccccggacagtgagccccacatgtctgagtcacacgtgtccgtcttccatttgaaggaggcctttgaaaagacagcagttcattctttaaagtctggctttaaattcaactttaatgaagcggccctgatgggcttacaaggagctgacactggacacgccaggctcctgggccaagcggctgacactagcagacctctgtccacctcgggttctcccacctgccggagttcccgcaggagccagtccatccaggaagcagggcctcccagctcctcaggaacatcgctccccgatgctgcctaaacaggtgcatctcagcccagcaggctcccttggcgcatggtggacacggtgctgcattgacaggatttgggcagaggagacgtaacttagctcggacctaagtaacaatgccgaccgcctgcgcccacggcgcccaggcaccgatgctcccaggagagggaaggggggagcggcagatccagggactcgaaccccaggcaggtctgaagggcttcacaggacatgatttttcagacccaagagaaacgaggaataatagagtcacttgcctttttcttgaaacgtcggaattatttgatgtgacttgtgtaacttggaaagtatgacataaacctaggtatgaaagttaaggagcgatgtcactcctccagttgagcaatggcctgacgtggctggaggggcgtaccgtggcagggaaaccaggagcacgctgtttgttagccacagagcagccacgcaggcagggctccatccgggaggcagagccactaggagtcccgtgaaatcagggattttctgagcagggccttctgctgtgcagcaagggttggggggtagcgtggggagctggggaagggaccactgcctccacgtctctgagccagtagggtggatgggcgggggtcaggagggacctggacacaaagcaaggacrccgcgggatgcaggagacatgccagtcccgtcctccagggacccctgcgtccgcccacccgggccaagagaggatgccccgcgcacgcagccttcccagcacagcagctgccacctgcctcggctccctttagcctcccaaaccttgtgcaaagtccaccttggccagctggacccagagctgcacgggggccacggtctggggcccgcgtcccagcccggctgagctgaccagctgtgtggcctcgtgccacctacctcgcctctgagccggtcttgccctttggggacatggaggttaccctgactgctgtgcaacttcactgaaggagccgcctgagcggagcatgacccaggagcgtgcaggccacggggaatggcgcctggacaggcctggactgtgggcaacaccacgctcgtcatcatccatatttggatgtggtcggcattagtacctgtccagtcaattacgacaccggcccttttcttccccgcaaccggcccactgcagccacgccgggmgctacggggagcacatcccatcccgcgaccgcatctcccgctccgtcaatcccgcgcgtcccctgcgccgtcagtcccgagaccgcgtcccccgcaccggcaaggctgtccctcccgcaaacccctggcttcaccacgtttgccctggggctgccccgtggatgatccaccacgtggtgctgccttttcagygcaccagagagctgcttcagggccctgcgggagatccagcactgccttcttgtgcgcggtgtctcgggcgtcaggggcggagcctggttcattcgcggggccccaggttaagttcagcagctggggctcttttcaaaggtctctgaaatcacctgtttgtagagcaagtgggctttgagcaattatttcccttgttcttcaaaagctgttttgcaaggctaggtttttaaattgcaataataatttatttagggggtgggggaggtttaaaaaaaaaaacttgtatcttgtgagccacagagcataccagtcgaacaacaggtgaaagacgcacggcttcgagatagaaaagatcctcatagcccgctaactgccaagtgcttgcatcttaacacctcccgccttccccgactggaagaccttcctctgcccgtatccaaagttccctggggtcctgcccagttgccccggccctgcccgcgcctgccggggtcctccttgtccccaccggccgccgagagctccagcactcctgcctcagtcggagggtgagctgggcctgcggcgtggagcatgtctctctgctctcccgctctgccttccaggcctggcttctgtgtcgctgccataggaggcggctcagtgctcctcctccgtgggccacttctgctgtgggttcctcgacggtctctgcctgcacggtgcagactcagccttcacccatggccaattctgctgtgggttcctcgacggtctctgcctgcacggtgcagcctcagctgcaaggctaggtttttctatgtcgtmacaataatgatctctttagggggtgggggaggttttaaaaaaaaacttttatcttgtgagccgcatagcataccatagtccatccactgcccgtttgcttttctggcaggggtccaccccacacggcggctcctggccccacatccctgacttcggcccgtccctcacgcgtggccctgcatgttccaggctccgtccatgtttcgcagaaagactttttcttcttcatgtgcttaagtgaccagcgctcccatccgcacaaccctggctgaggaataatgacatggaaagcgacgtcctctttcccctgagcagtttctcgtctatcaggaacagggtttttttttttttttcctcccttctcctgacatagtcacccataaatggtttggccttaattcctatgaaggtaaggacaytgctgatgttccttgagtccccacgctagcagcttctcatgcctttccctgctaagctccgtgctgtattgcttccattgcgcagtgagagcagcgcaggcgcagatactgctactccacaaaacaggaggctgagctttagaaggttaaaggctgggcgcagtggctcacacctgtaatcccagcactttgggaggctgaggtgggcagctgagaccaacctggccaacatggtgcaacccrtctctattaaaaatacaaaaattagctgggcgtggtgacggacacctgtaatcccaggtacttcgggaggctgaggyaggagaatcacttcaacctgagaggcagaggctgcagtgagccgagatcgcgccactgcactccagcctgggcgacagatmctgtctcaaaaaaaaaaaaaattaattaaaagattaaaaartttrccctggtttacccagataataaattacagagccgagatcctaacctaraacttcattattcactcattcatggaaactcttttggaagtgccactcttccagataattccacttaaaaacacatacacgtaattctttgattgtaaagaagtctggtctttctggcatttcctactgtttttcacaagtatatttttggttaaaactatttttgtgcagtggtacaaatcctacccataaaatgtcagggtagtcagatgccaagtaaaccactgcagcatttacctacacaatgccagccccgcccagccctggctgggaacctgggtgctggacgctgccgtgggaagggcctgtgaccaatgggaaatgctcgcattcttctttttttcaaatttattttagaatcgggggtacgtgtgcaggtttgcttcctgggtgtattgcatgatgctgaggtttggagtaagaatggatccgtctccaggcagtgagcatagtagccaaggggtggttttttttcactccttccctctccccttcctaccccctccctctgggggtccccagtgtctgtcattcccatctttgtgtccatgggtacccagtgcttacctcccactcataagtgagaacatgtggcatttggttttctgtttctgcattagcttgcttaggatcatggcctccagctgcacccatgttgctgcaaaagacatgatttcattctttttatggttgcatagtattccacggtgtatatggaccacattttcttataatcaaatgaggatgactcaacttctcaaacccccccgtgaagacacagctgtaaacatgaacctgccctagaagttcgatgaacttctcaagaaaggctgaaatactcccattcgtacccaggactaaattgtaatttttaaaataacaaacatcatcagaagctactgtttggaattacagattttctcaacatttggcacagtactgggtttctgggtagtttttgtctttgacagcttgaatagtctaaacatctcaatatttacatatttacatctttcataaagatttttaagagtaaaattataatattgtctgggtgtggtggctcacgcctgtaatcccagcrctttgggaggccaaggcaggcagattgctgagcccaggagtttgagaccagcctgggcaacatggagaaaccctgtctctacaaaaattataaaaattagccgggcgtggcagcgcacacccatagtcccagctcctcaggaggctgaggtgggaggatggcttgagcccagggaaggtgaggcttcagtgatcccagactgcaccactgcactccagcctgggcgacagagtgagactctgtctcaaacaacaacaacaaaagcattataatctaagttcttcctccccttgaagcacaccccgctgcagagtgttcatgaagcaccttcctttctctgcagctccagtgtttacgccaccttttacctgaaatgaccaacttgacgtggcatcccaataactacaaagaaaactaactacaaagaaaacacgcatgccaagtagggctgggggcaccccgtgaacttcagtaaaacacaaagatcccttgagaagggcccccccagactgggcacctttccagccggagcctcggcctcctccaaaggtggtgatgaagccaccctggcagagttgcagagggagtcccgtgagtgcagtgggtgcagagaatggaaggccactgtcactgtcacctctgacacagccaaggggggacaggggctggtctaggttgatgtctgcccacggtcccacaccgcctcctcccggttttctttctagaactcagtgcttggaccaccctgtttggtggaagccgagtgtcggggcatgtccgcctgcccccagctcagagcactgccactgctttgctagacaggcccatgctggagaagcaccaggtaacgtggctcagtgtcctgayggctcgtgagtccacaggagcagcagcacaggccacattccccacacrgactcagcctccaggcctgagtttgcttctcycaggactcaggccccacaggcttcctcgggaagggcccgcaccaggccctgctcttcctgagcccacagtggacgattgttttcacaccccaactcctcggagttgcagctccttcctgggttgccacagatcccagccacaacgcctggtcctcccagcctctcaccagcacccacttcagataggggagcggggaaccagagaccaaggcctcccaaggatggggtcagctggtgccaggatgaggagggagcaagatgctgggcctggtggcaggtgtgggcgtgatgcctggacagcagccatggccgcggatgggggtgctgtgctaggtggctttggttcttgcctggcaaggaaccggtgggggatggggaggtgggcagggcacggttgcagatgccaggagagcagggacctgcagccatgcacgcatgccacgatctgggaagcgttagggcaggtgtggggcctggcacatggtagagaacggaggggaggcgttaaggcaggtgtggggcctggcacatggtagagaacggaggggaggcgttaaggcaggtgtggggcctggcacgtggtagagaacggagcttcgactagaaacatggacattttcagaggtgggggtgttggaggaagggtcactgccatgctgtgagctgcggcccagacggaggccactagggctggagtgaggcccagacgggaggagaagcagtggtggctggtgcctgtgctggtcactttgtaatgggctttgtgtctggggctgtgttctgatagcacaggaggctggcaggaagggaaaagcttgcaccaaactgcacttcctattgtaagttctcaactttcccgatgaagggtctgtgggaaccacaccccacagcacagttcctctgtggggtccagtgggcatcggccagggaacagcaccgtctcctcccacagcacagcagacatgcctggcacatggcactgcccgggggacagaagcccactgcgcggggtgtgggttccgacgtcagcagagggaggcgtttaggatttgagcagagacataagtgtcagtagcttcactgtccttgccccctgcacgcaggcctggagagggtgcctgtgccgacaccccgcctttcctcccagttagttcctgccccttggagaacagccacaccacagaaatccatctcctgaccgtctgttatcagcactgccggccatggcaaaaccatctggtcactgactgtctgggcttccagcaggagtgggtgctgccagatgtttgtcataagccctgaacccttctgaaaggcggcgtggctgctgcgagggtctgtcccacggctgttccttgtcttggcggccctcgccatccctgagatggagctggccatctctaatcacagatttccagagtcagtggtttgctgcctttgatgggtgtcctctgttctaaaagatgaaaatatggatgctggactccaggtaggagaggaagctgcaatcagggcaggaagacggaaacagagagggtggcctctgtacctggaggtgggctgtaggttaggtgggagcttgtggctggggagaggatcagatttgataagacgaggatgggctttcgggtgaagaagccagctggaaacagggaagcagaagagagagtgcgcgttgaccctgaggccagcacaaaagggcgacagccacaccgcgcaccagtcgcccagctcgaccccaggggagctctggcctgggctgcccaggaagggagactggacgagggcacgtgctcgcccagagcacagctgcagacccatcctgaagcctgccccctctggggctctcagaggatgggaagctgtggctgtgccttccctgggatgcaaagtcaggtcatgttcggacaagtcaccatgttgttgaggcagcacttacgacgttccccgctacatccgtgatggccgacctgtcttagccgccctggccactcggtgcccccaccctggagaaaacccagccgagccaggccagagctgcagacacagcaggcaggtgggctctgaagagcccctcgtgagtgcgtgtggaggagcctggggtttggggtgcaggagctcgtggatcctgcttgggagcttgcagcctgaagaccagagcttttctgagcatatctaccctcaggggtcaagaaatcggaatgggagtctcgcaaggccgggctgtccagggcaactgcaagtcccacttggctgcaaagtcccatgtctatggaagcatctgcccatagcgaaaagcggagatgtgttcacggtggtctctgtccttccccctttccatccctccctccctccctcctctctctttagaaggcctgtgttagatgtgtttcctcatcccgtaggaatggtcccctcggtcttggtgaacatgaaacaaagggtgcgggcagttgggattctgtgcgcgcggctccatcagccttgattaagttctccaagtgatgtcgggctttccaccgcgtgtcagcggtgcagagtaacctcaattaaacagtcatttgagggagagagaagggaaaacgccttccaaacaatgatctcgtgtgtcttagcaacagccaagcttcaccttctcaaagaccctcccacgccraggacagagacacctcccgagcgagcgcactccgtgggcgctggagagcaggcactcagccactcctgcgagctgccggctttccctgcacacgctcagcctcttgatgcctgggtgctaaattacatctgacatttaatttaaatgcatggtgccttcattcaaaaataaacccgctgccacagccagggcgttcgccgcatggatttttttctttccacctgctctccctcgctgaccccatcctcactttgtccagtgcgcgcaaactggaattgagcctgtctctctcctcgggatattgccttgtgccccccatccacgagcttcccttcacatgtcagcatgtctccagttgcaatttataaccgagaaagaaatcaatcccttggtcctgcggctgcaggtccccccagcctactactgggcgtcgggascctcctcggccccacagctcacagcagctccccgccaggatctgggaggttttcccagagttgggcaggacgctcactggtgaggaggctctttagagcccacggtcgagtagccctttctagagaagctaaagatgcggccagaaggttccacggcctamcagcgagccctggctcgtccaggaagatcggccgatggtgccgagctggcccaccccagaatgcagctgcaccctgctccaatgccacggtgtctctgggaggcaaaccctgaggaagccatctcaggcgggctttacacccttccttccagctgtttccgaacccactgaggagctgaacgctgcggtacatttaagaatttctctctcaacagctcactgggtactcgacactggagccggagggagaggacaactgaaagcctcaggagtttgacattttgaacttttgccaaaacctrtttccaaaataaactggagacactccaagaaatgccagatacaactgccatcctcgggccagccttcctagcttgcaagaactgttcactcagatattggcagggggtccctggggctgggtctccagcagctccatgttacctgccacttcctgcctctcataggtgcggaggaagcagctcacctgggtggcatcttgctgcttccccaaggagctggcagcaggctgggacattcctgtgcagtagtagsagctcatcctctaygcctcactccctacatccggccagcctcattgccgtgggggaagccaagacccagagatttgattgttttgatcgtttggccaaaaccacacaacaagaaacaagagaaagaacattggtagggctgcttccaaaactcatccttttttctctaaatcgagcattctctaaaagatgatataataaaaattatgaacaacaagcaaccaaccagtaaaatacacattacgaagaaggatcaggaccacgtgctatgttgcaggcctgagtatgcatgccaagcagaagggccacaagcaaaagagccctcagaatcccctggggagcccacagcacagagaagcaggcctcagagtcacccgaacagtctacagctcagggacacaggcctcagaatcacgtgaacagcccacagctcrgggacrcaggcctcagaatcacccggacaccccacagctcagagaygcaggcctcagaatcacccagacaccccacagckcagggacacaggccwcagaatcacctcaacagcccacagctcagggacgcaggcctcaaaatcacccaggcaccccacagctgagggacgcaggcctcagaatcacccacacaccccgcagctcagggacgcaggcctcagaatcacccgggcagctcacagctcagggacacaggcctcagaatcaccctgacaccccgcagctcagggacgcaggcctcagaatcacccggacaccccacagctcagagacacaggccgcagaatcactcagacaccccacagctcacagccgcaggcttcagaatcacccagacaccccgcagctcagggacacaggcctcagaatcacctcaacagcccgcagctcagggacgcaggcctcagaatcacccagacaacccacagctcagggacacaggccacagaatcacctcaacagcctgtagctcagggacgcaggcctcagaatcacccggacaccccacagctcagggacacaggccacagaatcacctcaacagcctgtagctcagggacgcaggcctcagaatcacccagacaccccgcacctcagggacgcaggcctcagaatcacccgggcagttcacagctcagggacgcacgcctcagaatcacctcaacagcccacagctcagggacgcaggcctcagaatcacccggacagcccagagctcagggacacaggcctcagaatcacctcaacagcccacagctcagggacgcaggcctcagaatcacccggacagcccacagctcagggacgcaggcctcagaatcacctcaacagcccacagctcagggacgcaggcctcagaatcacccggacagcccacagctcagggacgcaggcctcagaatcacccggacagcccacagctcagggacgcaggcctcagaatcacccggacagcccacagctcagggacgcaggcctcagaatcacctcaacagcccacagctcagggacgcaggcctcagaatcacccggacagcccacagctcagggacacaggcctcagaatcacctcaacagcccacagctcagggacgcaggcctcagaatcacctcaacagcccacagctcagggacgcaggcctcagaatcacccggacagcccacagctcagggacgcaggcctcagaatcacctcaacagcccacagctcatagacgcaggcctcacaatcacctgaacagcccacagctcagggacgcaggcatcagaatcacgtcaacagcccacagctcagggacgcagacctcagaatcacccagacaccccagagctcagggacgcaggcctcagaatcacccggacaccccacagctcagagacgcagacctaagaatcacccagacactccgcagctcagggacgcaggcctcagaatcacccagacaccccacagctcagggacacaggcctcagaattaccgagaaaccccgcagctcagggacgcaggcctcaaaatcacccaggcagctcacagctcagggacgcaggcctcagaattgcccggacacccctctgctcagagatgcaggcctcagaatyscccrgacaccccacagctcagggacgcaggcctcagaatcacccgggcagctcctacctcagggacgcaggcctcagaattacctcaacagctcacagctcagggacgcaggcctcagaatctcccagacaccctacagctcagagacgcaggggtcagaatcacccagacaccagacagctcagggacgcaggcctcagaatcacctcaacagcccacagctgagagacgcaggcctcagaatcacccggacagcccagagctcagggacgcaggcctcagaatcacccggacaccccacagctcagagacgcaggcctcagaatcacctcaacagcctgcagctcagggacacaggcctcacaatcgcccggacaccccacacctcagggacgcaggcctcagaatcacccggacaccccacagctcagggacgcaggcctcagaatcacccggacagcccaaagctcagggacgcaggcctcagaatcacctcaacagcccacagctcagggacgcaggcctcagaatcacccggacagcccagagctcagagatgcaggcctcagaatcacctcaacagcccacagctgagagacgcaggcctcagaatcacctcaacagcccacagctcagggacgcaggcctcagaatcacccgcacaccccacagctcagagacgcaggcctcagaatcacccggacaccccacagctcagagacgcaggcctcagaatcacctcaacagcccacagctcagggacgcaggcctcagaatcacccgcacaccccacagctcagggacgcaggcctcagaatcacgcggacaccccacagctcagggacgcaggcctcagaatcacccggacagcccaaagctcagggacgcaggcctcagaatcacctcaacagcccacagctcagggacgcaggcctcagaatcacccggacaccccacagctcagggacgcaggcctcagaatcacccggacaccccacagctcagagacgcaggcctcagaatcacccggacaccccacagctcagagacgcaggcctcagaatcacctcaacagcccacagctcagggacgcaggcctcagaatcacccgsacaccccacagctcagggacgcaggcctcagaatcrcctcaacagcccacagctcagggacacaggcctcagartcrcctcaacagcccacagctgagagacgcaggcctcagaatcacccggacagcccagagctcagggacgcaggcctcagaatcacctcaacagcccacagctcagggacacaggcctcagaatcacctcaactgcccgcagctcagggatgcaggcctcaacacatgcggattcccacactgcctcaccatccccctcaactgctcagcagaccaggcagctgaacggaagagatctgcctttaatgggcatcttctgctctaraaactgctgaggactgtgggtgcagggcagtcccgtgatctccatactcagggccccgtgaagactgtggggtgtatagaggcccgtgatctctatgctgttggcaccgtgaggactgtggggtgtatggaggcccgtgatctccacgcccttggccccgtgaggactgtggggtgtagggagtcccgtgatcacactcagggccccgtgtggactgtggggtgcagggagtcccgtgatctccttgctcagggccccgtgagtactgtagggtgtagggagtcccgtgatctccacactcagggctccgtgtggactgtggggtgcggggagtcccgtgatctccttgctcagggccccgtgaggactgtgggttgtagggaatcccatgatctccttgctcagggccccgtgaggactgtagggtctaggggaggcccatgatctccatgctcttggccccatgtggactgtggagtgtagggaggcccatgatctccatgctcagggtcccatgaggactgtggggtctaggggaggcccrtgatcttcatgctcagggtcccatgaggactgtggggtgtagggaggcccatgatctccatgctcttggccctgtgaggactgtggggtgyagggaggactgtggggtgtagggagkcctgtgatctccacactcagggccctgtgaggactgtggggtgcagggagtcctgtgatctccacactcagggccctgtgaggactgtggggtgcaggggaggcctgtgatctccacactcaaggccctgtatggactatggtgtgtagggagtcctgtgatctccatgtttgtggcgtgcgtgctgagtgcatcctgcagccrgagaaggagctttgtgatggtcaaatcagggcgtgcgtcaaacatgttaggtttcatttaccgactgcctggaaatgggtaggaaccagatcgttgggtggtctttgctgctgtatcagcttcctcttgggtgagcgttttgctttatccacacggttctggagcctacaaaagatgctgacatttgagagcaaagcagcggcctccagcctgccctgcagatgctggcaccctcactcagcctctgcccagtgtcccagacgttttggggagataaatatcaggactgaggtgcaaatggaggggagaagagaggtgagcattgtcggaggagcccagcattgtgcagcctgccctctcccccagcctgcctccctgagcctgccctgtccctgagcctgcctcccrcagcctgtcctctcccccaacctgcctcccgcagcctgtcctctcccccatgcctgcctcccgcagaccaccccyggctctcagccttgcgttcgtctggagcaatgtttacagtgagagggtggacgagtccgtgcagaagcttctcatccagcagatcactggctggatctgtgatgacctgggctgagacatacacagaaggacctgggcagggccccaggagctctagggtctgcccaggggccaccgttgctgactgtacgagctccacctctttcatcctcatttcttcccctgagaaatgctggggtggccactcctggagctgtctcggtctmtaaatcttagctccgtgcaaggggagcatcrtgacccaacccagatgcggtggcatagggactcagaggcgcctctcagacacccgtagtcctcgtaaggaaggtgccgcctggaaggggacccacatttcatggaggcagaagtgaggggtggtggggagtgaggtgacacgcctcagggcccctcagagatgccgggggactggggtgcggctgaagtgaacacccaggggctgagggaagccccgagtcgtttggtaagaggcctttgaacccattctgttgctttttcatcagcctggatgtgcctgagtgatgaggacagtggggatctgtggcttcccctccrcctcactcagtgtccaccaggcagacagacctgtccttgggggcccttccacatcctccgtcttctgcacacgttctgatggtactgaagtgcctcacacatttaaacatgaaaacagcagactcttactactttctaaaattcaaaagcagacccaatctcatatcttaaattgaggttctagatggctactatattatacctctatttgtgttttaaaccaagaattattttaaattttttaatattaaaatggaattctgagcatgctcaccagagccatttattcttcccagagcagattccatcgttgtgtaatggacggcacatcacggcccgatgctgggatgggaggcttgggtctgttgaacgggcgccaggtcgggtccccagttcctatcaccttaggtgacgttccagcctcttccacttgtttgagtttcaggctccttgaatctccttcgatgtctgggagagctgctrtgttcaccccgttgaggccagctgacccccagcccaccccagcatcacggcttctgtgccctccatgcctggaccacctcgcgcccgcttgtttacgctctgattcctccatggtcttgctgtacccagtaacctagcacgtagtagcacctcaggaaacatgtgttgaattaggacttcccataaaaacagaaagcatgaaggggatccagatggtgtcaagcattagctcttctaagctgcgtcagagtcgtgccccggagcacgtctcctgcagcagcatcgccccgtcacggcaccgcctcacagctcccaccacgacacatgcaacgtgcaaagaggacacagsgagctgcgacttccgtggctggtggcaaagaaatggggcagcactttcacagccatgccaggaacctaattcagccaacctggaaataactatcccagccacggccttgccagaagcccagctcagccaacctggagattgttatcccagccacagccttgccgagagcccaamtcagccaacccagagatagctatcccagccacggacttgccagaagcccagctcagccaacctggagatcgttaccccagccatggccttgccaggaacctaactcagccaacccggagatagctatcccagccatggcttgccaggagcccaactcagccaacctggagatagctatcccagccatggcttgccaggagcccaactcagccaacctggaaattgttatcccagccacaagtgtgggtcccacttaaatggaggaaggatgagtcacaaaagcagggtaatgtggcctatcccgtgcctgtatcgctggcaggtgggaagcctaattcttaggccctaagcatagcccrccgcaccgattgcaggctggtcccaccgtgagcagacagcactcctggctccactccacagcttagccaggaggattcaggcaggtccaagcccattaccagacctcgctgtggaaggcggctgacattcgaamccactggatgggcatctaagtctctgacctttgctgatggtcggttcccagagctgcctcccctgccctcaccccaagagacctcctgacctgtgagtatctctagaactctccagaagtcagatgcagggagctgcccaggctcagtgagtggtccgttcattacaaggttctctccaccacagataacacaagcacagcctggctcagtgagtggtccattcattacaaggttctcttcaccacagataacacaagcacagccttagcacagagcattgggttggatcatgcatcacgttcatgcaataccgaagcattttcaagacagattaaactgagtagtgggatggtcctcttccttggctacttatgagtatttaatatcaatactttggaattacaagcaaaaggtattargaagaagaaactaagctccaagttggtatcatctcactgagactgtgtctttctgcccaatgtgtcaagctcatgaataaaagatcaagaggacagttaaggggttatgtgaggagttcaaagctcaaacaaagaacagcaacagacagcagacacacatcttgagatggagttggtgctgctcaggcgaacagtcccccaccctagattctgggtgtgcttggagcttctcaccctcgtggggtacacgcatctgcagatggcttcacctccaaaatgctgccctgccatccacattcatcgtttactccagcaatcagcaaacctagatacccacttctggaaaaaaaaaaaaaaacagaagtcagctcatcaagtagtctctctgtacctctaaaactgttcaatgaataaataccctcacaatctcaaaggaatattttctgtcctacttgtatccaagtaactgaatttacttccttcttccttttcaaaaatctctggagactgccccgtctaaatacagttaagtagctggttaccccagtcacctgtttaaaaacatctggagactgcccatctaaatacaggtaaataacgcgttaccccagtcacctgttctccatctacatatgcaaaagccctcgataactttggcccttttgatgctcaaatcagtgaccacattcacatgagttacaggtgattggaaaaagcctagttgtaagcattgagcacastcagtcaccgtagagagatacatctagaagggaatcgtgctggattatttaggtgtttgtcaacacagggccagaccatccacacagaaagagcgctggtcagattgttggtccctgccacacccgactgcacacattcatttattggttcgtcgttgacacaacttctgcaatctgatggagaatgcaaagatgaaccagacatagagctggccctcaaggaccccaagtctaagaggaaagatgagcagagaagtaactgagctaggagttaaaaatgccggggacatgaagagcaaagctgagagaggacagaagcccaggagatgccaggtgcagtgtccacaacatccttcttcccaagggccacagagactatggtttggccaaacagttgtccccttcttccctcatagcttagaggactccacgtacaaccagtaaaactgacctcccagagggaggagagccactgaatcgtgcatgggtcatgtggacgggtcttgcttcttcctgcaaatgtccagagagaggtgaggaagagagcgtctccggggagggttccaggagggactgattcttgaagtggttttgatggaggagaagcatcctagacaagatgaacagcgttagcaaacacacggggaagggatgatggggctctaggtgccgaagagccttcagtggggractaagagcaggccgggcacccatgggagggaggtccacaggcaatgccttccttcaccaattctcagtcttgggcttgttggccggaaacagccagcagtagtaagacacacctttcattttacttactaaagatatgttgcaatcagtagtcattatcaattgataattgattggcaagtcattttaaaaagtgaggaaatcaagtcccaggaaaggtgctggagccaggctcttttccatagggctggtggacagggcctttgccgtcatggagcctgtggaaggaggcgtgkggtggctccgactgtgagttagaagcacctttggcctccaaatcacatgagcatcatctccccccttcccttgttgctcgtttcagtagcatctgaaatggagagtttatttgattattttttcctctctgacaaagtaaatagggttttaacctgtggtacagagggaacaaagtggcccatgggttttccaataatattttggcccttgctcaggctaatgggaactttcaaaaaggcggggagagagagcggctctaattataatctgaagaacgaatctgcttacaaatccatcagaacttgattcctgggatcccgtgggccaggggcactgaggtgattccgaggcttgctggaaagaagccagtgcccatcgggatgggattctccaccctctcattagctcgtggattgtttaaaagaaaaagcattgattaggagcctctgagaagctcccgccactccttggagccctctctggggaaagacgacaatatttcagttgctctgtgtgtttcccctgcccygggcactacccacccccaacccaggtgatggccatggcagcatgaagtcaccccgtggacagagggagacagggttccggagctggtcaggctcccgcgttgccgtggayggagggagacgrkgttccggagctggtsaggctccccctgcsttgccgtggayggagggagacgatgttccggagctggtcaggctcccgcgttgccgtggacggagggagacgatgttccggagctgaagccgaagcaatttgaccttgctggttctctggtggcttttctgagtctgggtcattgataggttagtgttctgtgccctacaggaacctgatccaccaaggaaagtgttaaatttaacaatgtatacataataacaaatctgcatctgggcaatggcattaaggtagctcaccatatacaaagcaaagtgggtgtatgtgtacaacacggttaaataaagtgataaaaggcatatggaggaaggggtcctgctggccgaatcagcaataaaaaagcacaatataatgtacagttaaacccatgtagatataaaaaaattaatgaaaagatccagctgtgctaaaagtggaaactccatacagtcccagtgattccgctctccctgaaccctggctggctctggcttctggaagaggaagaggtcagaggaaagctgctctgtcttgctggggagccatgcgtgagcacgcagagggggtggaatgagcggcccaggagctcaggcctccttgcggtcaccttgggaggtgtcctgttctctgccgtcagaaccaaagcacatccatcttggagtgtcccaaaaacacagtatggtgaccccagggctgatctgtgtgcaagatgactgaaattagcatctgccataatttggtatttgattccataacaaccttgtctggtcacacctggggagaaagagctctccaagagtcccagatggcagttggcattgagttgacctcggggcagctgaaggcacaggtgtcactctgcctgtatggtgaccgtcagaactcaggacggctcttctcacaacactccaagatactaccctcaatttcttgctggcactttaacattttttacaggagaccatcttttcctcccctcatagacgaataagctacaacgmaggtgcccctgggccrcaaacccatctccaaaggctgcgagactctggaggcagrtgccggggtgagagagtagtcaggaagaagaggcattttaccagtttccctcggctgtcccagccaacatcacatctgctgctgcttatatttgtgtccagctgctgttatgtgggtaattcaggggcaattcagaggcatgaagtttcagacgagactgagagccatggagtttgctttaatctccggaacatggaggattaaccgtgtgaccttgggygagtcccccccggctgtggctcttcatgtctgcagtgggttktagagaaaggcctgtctccctatstcacagagatttgggaacaagaaatgaaaactgatgcagaaaccactcaaagctccttggaataaagatactatctgaattgcaggagcctatgaagaaaacccctaatgcgaagttaaatcttaaaatcaaatccttccaggtgctctgtctcctgggctgcacccctctctcctgactcttttccatcttcctccaaaccmaagtcgctggggatgtgtgggtggytggtgggacagccctaatttgacctgtgagcatcctaaggacatgatgcccctaccccttcatggaactagaaataatacatacaaaaccctaaaacacgtgtccagaaacagcacggagctctgaaataatacatacaaaaccctaaaacaagcacgtatccagaaacaacagcacagagctctgatttctcctgtgatgagccgtgatgacgacttcaatgcctaaaatgtcaaatatcgagtgattttattcaaaatgaaaaaacatggattttgtcctaagcgtcagctcagtctgcatgtgagtgaccagccgctggctgcaccacaaacaacccgggaccagcaccggcagcctgcgtccctcccacccacctctcrgataaggctcccatcagagaggagcctccagaggctgagaaacttcacaggatgccaaatgcttccatgagtccctggtcttgaccctgccctcctcccttcgctcctctgctgatgaacttcacgccagtatcaggctctcaatcccgctccccagcacctccctcccctctggggcgcctccttcccggtggtgggagagatgtcgaattcagacgccaggaatgttgaaatgtcagccttcccagagcacacagatacgtccccctgggtcacgtggagcttattgtgtacggccacattcctgttgattctcagctgcctgtgagatccttattctaatagatgtttcaaaagaagtataataccgagaggccttaatagtgtttaaaagtgaaactttcatgacaagatataatttcaaaataacagctctccacaggaacagtgaggccctttggggcaccaggagatggatgagaagagaggaggggtgagtggcagagccctctcttctgacccaggcattcccgggagcctctgtccctgctgctgcaggtctggccaaggcagcaagagcccctcggagcctcctcccccgcccagacaccaggtcctccccgcatcgggggtggtatttgcagattaacgcacagcatcctaattcctagtcaggctcttccagaccttctaagccggccttgtggccttggtggctggcgccccagccggcacccacgatgctgtaaatgctcccgaggaccagggcccttcctctgtggaggggctgccacgcccaggccccattctggggaaagcaaacccctccctgtaggggaacactctggagctcaactcaggaccgtgagtacgaatgggagcrcctgggcccagagaagccaggccaggggatgggaacttgctgctgcgtcctcgcctcaggggataaccagggaagctcagccctcctgcctgcgccccctgcccgggcacaacgcttagcttccactggaggtgaggctgcccggccagagagcaccatgctcctgcatgtagggctcactcacagcacacgtgccctccaagcccagcgcactcagactcccagatcaggttgaggtcgtgctgaggctcagcgaacagagcctccaaaccacggacacaggaacactgctgggggccgcgtccacacaggccccagtctggggcgagcttgggcttctcagccctcagacaggagagtgagctcgccaggccgtctggtgaaggaagacgcatgaagataaaatcggggagcaacgtggcgtgtgtaccgaagcttcatgaaatacatgtcaaattaactttttaaatgaatgtgtgaaataaatacagctgcaaccaggacgtagttcacttctgtttatccaagacgcctggtgtgatttcttgctggggtttcttcttactgagaagatgcattgcccccgggagactcgggaagcctctgcaaagggcacctgaagcaggagcacatttactctaccctttaaaaatgtcatccccatcccaccaggacggagaggagcttttcatttgtagagggaaactgttaccccttggctccaaaaccaatatgtgtccagccgggcactggtgggattgtacctcctctgattttttcactcaacatggagggacctgcatgtaagatgtaggtgagcgccgtccacgaaagagcaggagacacgagactccgtggccaggggcggacaccaagcctcccacactaagacaagcactggccatgctccccaagccgtctgcgtgcatctgtgtgtaagtcatcacgggtggccgtgcccaggaccacagactgggtgcattaaactgcaggacacgtctgttctcacagctctgacagtcccagaccaagctgtggggggcggcgggggtgggggcggttcttcctgtgacctctctcccgggcttgtggacagcatcttctccccatgtcctcacacggcctttccctggtgcaggcacggggtgtctctcactcttcttrtaaggacaccagtcctgtaggatcggggccgcccttttggcctcattgaaccttaattagctccttggaggtcctgtctccaaatataggcacatggggatcagagcttcaatggatggatttggggggtcacaattcagcctataacaacctctaaaactgcaaggccagagttaaaccctgaatctcgcccagatttaagcctggaacacagaggccttctggctaagagcagcctcctttgaatggtggtgggaaagggaaggttctcgggctggtgtgatcgggtgatgtatccccagccagagatgcttggggctaccagtggtgaagctagggcagcgggtgccggcctcgcccaggcaggaccaggacacatgctctgctccagggcatgagatccaaggtgggtgtttgggaacggggcccacccaccggccgtctctgacccttctttgaagcctgtctgtcacgtcaccttcagctcagaaagggcctggagaatcttggggcagcttctcttccaggtggcttgaggcatgtgccgatcgctatcaacacaccgggaattcagagcccacccagcctcacgggggcctcctttcccgagaaggtactcagccactgcctgccaggaggacggggaccaaaggcgcccacctgctccccacatttgcggagcgtctcccacaaacaacactgagagtgtcactaaagaaagcgcctgccccgaggagtttagaatccagccaaggaggcgagtcatgttctgtcatttaatgtgttttgatgccattcaaccccttcatatttttaacaatatgttaagtagacttccatttattttagccccagctgccttttgagaaagctcaattacttttgaacaacctaatcatttccaaagggcagcttcaaaccctcattttctaaagcagctcagcagccctccaccttcctgggccgctgcacacagttgagtgtggacgcagataagatgcaggtcaccagcaaagtcagatgcactcctggccgctctctgatgacttggagctcaggatggacaccatacagtcagagatggctgcacccagctgggtccacaggcatagtcagtgggactgctttaccaaagggactcatcaggttagtccaaaaacaatacattcgatggatcttcccaccaaattcacgcaagagttgcttgagtgtctgttgggtcaaaatggccaatgtggctgtgcacatgaacacggagcttcgccggccgaaccacgggagcaacacaggactgtggccacaggagccgtgttcagctgagcacayggcgctccccagcaggtctgggagacaggtccacsaggccaggtgctctcggtgccagcggcaccactaaccgtcctgctgcagttggcatcacagccagaatttgtttggggagatgggactcctgcatcgaggcagttagcggctgctatttaataatctcagatgtgtgtgcgcgtttcctccatagcaacttgcctcccacgtcgacatcaatattggaaaacgcaggcacatggccgagcgccaggtcctggtgtgggtttgcctctggctggctgccctgctggtcccgggttcatccatgacacgggtgggactgaatgtgggatccccaggacccttacagttccaggttattgtaacagttttgtgttatcatttcgaagccaaatgagaatggcttgaccccagatgtaagtacagccttgtaacgcttcagtaagatgggagcagagttaagaatagagactgtttatttggggcgtctcggctgaatcaccatttagtcactgggatgttgctaaaatatttgtacatctctggggctgraagatgttgaaattgtttctttgcctgcctttttccatccattacaaacccaaagagctgaaatttaccttaaaggtagactcattatattcaagcatgcttgctcctgaaggtgtgtataaatcttgtttgaaaagctgaattgggttttcctggaacaaacattgacagtacctaccctggaagcctatgactgtgctgggtgcatggaatggaaaagagtaactgcgctgggtgcatgggacggaagagtaactgcactgggcgcatgggacggaagactgcactgggcacatgggacggaagagtgtgctgggagcatggggtggaagagtaactgtgctgggcgcatgggacggaaaagagtaactgtgctgggtgcatggggtggaaaagagtaactgtgctgggcgcmtgggacgggaaagggtaactgtgctgggcgcatgggacgggaaagrgtaactgtgctgggtgcatgggayggaaaagrgtaactgtgctgggcgcatgggacgggaaagggtaactgtgctgggcgcatgggacggaaaagggtaactgtgctgggcgcatgggacgggaaagggtaactgtgctgggcgcatgggacgggaaagggtaactgtgctgggcgcctgggacggaaaagggtaactgtgctgggcgcatgggacggaaaagagtaactgtgctgggcgcatgggacggaagagtaactgtgctgggcgcgtgggacggaaaagagtaactgtgctgggcgcgtgggacgggaaagggtaactgtgctgggcgcctgggacgggaaagggtaactgtgctgggcgcatgggacgggaaagggtaactgtgctgggcgcatgggacgggaaagggtaactgtgctgggcgcatgggacgggaaagggtaactgtgctgggcgcatgggacgggaaagggtaactgtgctgggcgcatgggacgggaaagggtaactgtgctgggcgcatgggacggcaaagagtaactgtgctgggcgcatgggacggcaaagagtaactgtgctgggcgcatgggacggaaaagagtaactgtgctgggcgcatggggcggaaaagagtaactgtgctgggcgcatgggacggaaaagagtaactgtgctgggcgcatggggtggaagggtaactgtgctgggcgcatgggacggaaaagagtaactgtgctgggcgcatgggacggaaaagagtaactgtgctgggcgcgtgggacgggaaagggtaactgtgctgggcgcatgggacggaagagtaactgtgctgggcgcgtgggacggaaaagagtaactgtgctgggcgcgtgggacgggaaagggtaactgtgctgggcgcatgggacgggaaagggtaactgtgctgggcgcctgggacgggaaagagtaactgtgctgggcgcctgggacgggaaagagtaactgtgctgggcgcatgggacggaagagtaactgtgctgggcgcgtgggacggaaaagggtaactgtgctgggcgcgtgggacgggaaagggtaactgtgctgggcgcctgggacgggaaagggtaactgtgctgggcgcatgggacgggaaagggtaactgtgctgggcgcatgggacgggaaagggtaactgtgctgggcgcatgggacgggaaagagtaactgtgctgggcgcatgggacggaaaagagtaactgtgctgggcgcgtgggacgggaaagggtaactgtgctgggcgcgtgggacggaagagtaactgtgctgggcgcgtgggacggaaaagagtaactgtgctgggcgcgtgggacgggaaagggtaactgtgctgggcgcgtgggacgggaaagggtaactgtgctgggcgcgtgggacgggaaagggtaactgtgctgggcgcgtgggacgggaaagggtaactgtgctgggcgcgtgggacgggaaagggtaactgtgctgggcgcgtgggacgggaaagggtaactgtgctgggcgcgtgggacgggaaagggtaactgtgctgggcgcatgggacgggaaagggtaactgtgctgggcgcatgggacggaaaagggtaactgtgctgggcgcatggggcggaaaagggtaactgtgctgggcgcatggggcggaaaagggtaactgtgctgggcgcgtggggtggaaaagggtaactgtgctgggcgtgtgggacgggaaagggtaactgtgctgggcgcgtgggacgggaaagggtaactgtgctgggcgcgtgggacgggaaagggtaactgtgctgggcgcgtgggacgggaaagggtaactgtgctgggcgcgtgggacgggaaagagtaactgtgctgggcgcgtggggcggaaaagggtaactgtgctgggcgcatgggatggaaaagagtaactgtgctgggcgcatggggcggaaaagagtaactgtgctgggcgcgtgggacgggaaagggtaactgtgctgggcgcatggggtggaaaagggtaactgtgctgggcgcgtgggacggaagagtaactgtgctgggcgcatgggacgggaaagggtaactgtgctgggcgcatggggcggaaaagagtaactgtgctgggcgcatgggacgggaaagggtaactgtgctgggcgcatgggacggaaaagggtaactgtgctgggcgcatggggcggaaaagggtaactgtgctgggcgcatgggatgggaaagagtaactgtgctgggcgcatggggcggaaaagggtaactgtgctgggcgcatggggcggaaaagggtaactgtgctgggcgcatgggatggaaaagagtaactgtgctgggcgcatgggacgggaaagggtaactgtgctgggcgcatgggacggraaagggtaactgtgctgggcgcatgggacgggaaagggtaactgtgctgggcgcrtgggacgggaaagggtaactgtgctgggmgcatgggrcgggaaagrgtaactgtgctgggcgcgtgggaaggaagagtaacacaggccctgtccccagggagacctctggacttacttatttgttctgtccatgggttttgtactgaatgtctgccatatgccagatacggttctagtcaccgcagagttcacattatgagcaggcagttgtcacacgatgcaactaggctgtaacagggctttctgcctggtgcagaccttcaggaaggcacctcgattaccttcctcggaactcagggtgggcttggcagagcagctgatatgcgggcaaggttttgcatgctaagaagtgatttgacaactggacgaggttagcaggagcttctcagtgggggcagcgcagaggtgaagtcgtaaaggagcctgctgtcctaaggctgctgggaactgcagggggtttacttgaatgagacaggaccccctcgtccagggctgggagttcaggagaccacgtgtggcacctccattttctcttcagagcaggacgtgagctcacctgccacaaaagagggggcattgggtggggagttggggagaaggggaaagtcctagtgcagtccccatgaggaatgagagagagaacaagcggaagagctgccaggtccctggcgggagccacgccgaggtcagagccctcccctgtggcttgcatgtctccgccatgtgcccaggcggggagcagccccggggccacagaacgcctctgtagcggggaagtgttgggagggccggctctgtcccctaggcgggccgtgcactgttttaaagaccccactgtggtcatcatcacctcctaactataccgtgtacaattccacttggtcatacccttcatcgtgaagcaatctcactgcattttaagagaggttgaagcattttgacaacctcagtaatgggattttggcagatggagggggaaatggcccagcctttattttcagttgtgccatacaggagggcaaccgctgtcacccctggggcaccacctcggccaggcgtgcgacctcttgcccaggaaccccagaaagggggctcaggggcttaagctgctttcaaatgtctgccgcttgcgacaccctcctctgttttggctcctcatcctcgtttttctagaagaggaaaggacagtagccacatttcaaaaaacagttccaggaagtttactttgtctggcgtagaagacgagccttaaagccagacacagttaaagagcaactctgattccaggacatgtgtccagccacagtgacacagcttcaccccgagtgcccggggggggggcaggggtggtggcctgagtgggactcaggtgccatccccaggggtctcagaacccagaattgccaggctctgtccctacttggttaaaattttatgcgaatgtggactttaccctataagcccatatcgttattgtataaaaatcattttctctaaatcttccaatgaaagtgaccctcgagcacaatgggccatgtctatcttgtggtttctgctccctggagagaagaatgccctgttcctggcccactgaatccaatgctggactcctccgagtcacactcacagacacacgtggatcaggtttaatctaaacacctgtggcccagtcaaatggacggtccttccctcatccgcctgccgctccccgtcctccacgtggccagcaggtggcccttatgggtgtggtgcagtcactacctgggcaccatctctgccaggcgtgagacctcagccctcttcctgggtcctttccagcacatgggctctcagcgtcctcaccctagcgaccctcccaggacctccctgcaggactgggtcaggaccaggaagccctcggaccccaggatggccctttgcaggtctcaggcactgcagagctccttttgcaagctctgatgttgtttgatggtgtccggctcaccagaggctccactcggacagcaccagcacagtgcccacctgccttcggggaactttgcattttagcagcggaaacatttcctcaaagagaagtcttcccaggagtccctatgcacggagctgctgaagatggagctgtccacgggagcagagtkggggktccgggacctgaaggcatccagccctccagagcccagggttccagccaccgcacagactccagccactgtgctcaagacagctcatgggttcccacctgcctcccaaaacaaatctgggccaagtggattagagttttaaattcattctttttwaaaaatacatgaagattcaaagatgggcagatgcagaaaatgaaatactctatattgtatttaataggaattctgtccaaaaaaaaaaacagagatgggtatatcaaagcaattatcaacttctgcatcttttctgttttcctccccgactattttcaaaggcccggtatcagcccagattcccattgtctgtgtccagacaacgaccgacctctgtgtgactggatcacgtgagccaaactcccctggccccgggtcagcgccgtctccctcgaggctgtttcctggtctccttgggacatttatgaggagagctgattaaggtggtgccactcctggacccagagaaagagttctycatgcctgggctcagtggggctcatggaagtctcttctgggggatttgaggttctggtctgggattgggaattcattcctttttgttccaatttcattaacctcatataagaagcaggtaaaagcaatttatgcaaatccttttttcaatagtctaagacattttaccttttgataatagcagccaggcaaaggaaggagccgcagacaggcaggttttgaggccccaatttaaaatctgagctacctttccccacctcttcaaaagcctttctgtggataagwtaagagtgtaatcccttagtctggtacaaatgttttaagactttgtatttctaaaatccaatttgagttatccttgaactttaaagctgttttgtccactgarccaagggccccgggatgcagacaagtgtggcccagcccctcgcccccgtgaaaccccagccgccatgggcgccaggagccctgtcagaggcaggaggcaccgacgcagatgctgtgggcttgtcctttctgagaaagatcttcacgcgccttcttcccctagacggagaggcttggggtgcaacagcagcccttgctgctggccacatggggctgagggtggcctgtcaggaggctgtacaaggcatgattgcaggaagcacagtgaggagaccgcgcggcagagtcggccccatctgtgttctcctggcttcgtgggacccggacaccccaggcctccgggctgcatgtgtctgcccagctgagctgacctccttgccagaccctcgctgggtacccaccgggyaccaggtggccctcaggagcccctctgggcctccaggtgtagacgggagaggcagagcccacagacgtctgcagggtgggagctggggggcccacagatgccccatagcagaggggagggtgctcagctgggaggaggctctgagtgtggaaggatggagggtgggtttctgggcacagggcagccagagatgcagcagtgcaggccccacagactcaggggtccaagggcaggggctgctgcagcttcaggcagggccagcagcagagctggtcgcgggggtctgggctcaatcactgctcacggctcacgcctcacactttacgtgacacttctggttctctcaagcctttttctcagtaatacagaatctcatagttacgtaaacgacacaaaacagaaaatggatcgtcctaaccgtttttaggtgcacgcctcttagcattgtatgtgttcacaacgttgtgcgagcatctccaccacccatttccagaaccttccatcatcccaaactggaactctgtccccagtaaacactgacccctgttcctccccccaccccggcagcccactctaccctctgtctctgagtttgatgactccagggacctcacacaagtggaatcacacagtctgtgtcctctagtgatggcttctttcactgggcagtgtccccagggttccctgtgttgtgctgtatgtgtcctttggtgactggcttatttcactgggcacatgtcctcaggactccccatgttatgccatatgtctgcaccccctcctcttagggctggtgacatctgtcagtgtggatggaccacattttgctcctctgtccatccgtccacagatgctggccttgcatccaccctttggctgctgtcataaagttgctgtgaacctggcgtgcaaatacctcttcaagaccctgctttcagttgttctccatggacacccagacatagggctgccggctcctatgggaattccatttctaactctgaggaaccgccaccctgttctccctagctgctgcaatagcgcagtgttcccatctctctgccttctcaccagcacctgttactttctgtttttttcggtaagagtcacgcacatggcatgaggtggaattgcactgaggaatcatgcttccccaatgattttggtgacgccaagcgcctctgcctgtgcctgaggtcatttgtgtgtcttctttggagaaacatgtgttcaagtactttgtgttttctgaacgagatggttttccatcgttattgtagttgagttgtggaagtttcctacatgttctggatattaatcccccactgcaatttgattcgcaaatcttttccccctttatatgggttgtcttttcgctctctggatggtgcgctttgacgcacaaacgttttsagtgtcatcaaacccaatttatctatttttttcttttgkgcctgtgtttttggtgttatatccaggaaatcgtggccaaatccaatgtcataaaggtcttgccctgtatgttttaggtctcacatttagctctgagttcatgtatgttctggccaagtgtgcgtccagccactctgctattcgctgtgagtcagcgcacgctcgggtgggaggtgacggtctggctcactcctctgcgtgtggatatccagttttcctgggaggcgagggtctggccacactcctctgcgtgtggatatccagttctcctgggaggcgagggtatggccacactcctctgcgtgtggatatccagttctcctgggaggcgagggtctggctcattcctctgcatgtggatatccagttttcctgggaggtgagggtctggccacactcctctgcgtgtggatatccagttctcctgggaggcgagagtctggctcattcctctgcatgtggatatccagttttcctgggaggcgagagtctggctcattcctctgcatgtggatatccagttttcctgggaggtgagggtctggccacactcctctgcgtgtggatatccagttctcctgggaggcgagggtctggccacactcctctgcgtgtggatatccagttctcctgggaggcgagggtctggctcactcctctgcatgtrgatatccagttctcctgggaggcgagggtctggctcactcctctgcgtgtggatatccagttctcctgggaggcgagggtctggytcactcctctgcgtgtggatatccagttctcctgggaggygagggtctggckcmstcctctgcgtgtggatatccagttctcctgggaggtgagggtctggccrcmstcctctgcrtgtggatatccagttctcctgggaggygagggtctggctcactcctctgcatgtrgatatccagttctcctgggaggcgagggtctggctcactcctctgtgtgtagatatccagttctcctgggaggcgagggtmtggccacactcctctgggtgtaggtatccagttctcctgggaggcsagggtctggctcactcctctgcrtgtggatatccagttctcctgggaggygagggtctggccgcagtcctctgcgtgtggatatccagttctcctgggaggygagggtctggctcactcctctgcrtgtagatatccagttctcccagaaccacctgttgaggaaaccgtcctttcccccacaggttttttaaaagtcagtttatttttgtttagtatgggaaaaagcaggttatttttaaggacacgagaattttatttcagatcagtacatttttaaggttataaaatttagttaatattatctttaaaatattgataatatttcaagccagatattgactctgtcccatttaacatgtaatgcatgccttttaatttactttaaatttatcatgtaagaagaagcatgattcatggaaagcagactcaacaatacacagatggtccccgcctcaggatggttggacttagtatttctcactttacagtggtgtgaaactgtactctgagtgctcacccaactacgctgttattcactttcagggcagtagtcaagaaatggcctgatatcttcagcactttatcataaacaggctttgtgagagatggtttcgcccagctgcaggcttgcatgagtgttctgagcacacgtaaggcaggctgggctgagctgtgatgctcagcaggttatatggatccagtacgtctctaacctagcacatttcgacttgcaccgggttcattgggatgtaaccccatgatgtaaccccatcatacactgaggaacctccatagtgtgtttatctgagaactgaatacatatcaaaatgtaaagtaaatttaaccaggaaattggctccaataatagacaaacaaagctttcagtgacctgatggctaatatccttacccgtttgattatagaagttttatgttcgtaattcctgttttatttgtgaattacaagagaaaatgaacagtttcaggctgctatttgtaagcaagcktctgcaaataaatgtgtttcaggtgggggtagcctaaatgtcacgtaaaccagcgcaattcagatgggggaagcctaaattccacccacaccagcacaattcagacgagggaagcctaaattccagatacaccagcgcgattcagatgggggaagcctaaattccacccacaccagcacacttcagacgggggaagcctaaattccagatacaccagcacaattcagacgggggaagcctaaattccagatacaccagcgcgattcagacgggggaagcctaaattctacataaatcaacaggtctcaggtctctaaattccacataaattaaatcaaatttggatagattgattcccagacgttctgctctgagcgttgtgtgcagcgtggaagtctttctggcctgctgtgtatgagcgggaattggatggtggtggattcgctttggggcatggcttcattgctggcttacgtctctcacacttgctcagggtccgtgttccttccagagcttgcctttcatcagactccatctgagcaccaatttgactgcacatccctgagtaggaaaaagcctcacgtttaacatctgcagtgcatagaacttccacagtggctggcaggtcacttgggtgggatgacagcgtctccggggacaaggatggacaggtggatgggtgargagcatgaggtgaggaaggcctgggctgtggtagagaaaggagaggagggagaaagtgcttgggaacacagccggcgagcgcagtgacatgctggtgtggggagaggggcacggggccgagagccacagtgtggagctggtttgggactggagtagaagctggttcagggagaagccgtgagctcagtgggggacaggtggccagccggggaaaggccaggggacaccaggggaggcattcagccagygctgtgacaggagagcctgcagctcaggccaggccagaccagagctgtccccgtggacattctggtgccagagtgtgggggcagaggccaggagaggcgtcagggcaaggggacagtccgtcagggccccacattctatgttcaccacagagcagctccgctatcctcagatgctggctttctcagcttgactgtgtgagttcctctttgaaggagaatttctgaatgtgacttaattcaattttgtgcttccaacaaatcttccctcattaaaaatagctaggagaccatctgcattggtgagagtctgggtttccgggaaatggtaacgaaactctgcagttgagccagggacgcaaaatgcatcgccctgccctgctggcggtgggctgttgattcagtgacctaccaggtgccaggaacaggggtgacctcacaggtgacacagcctggccccaccaccaagcatggccccacatcgaacccgtgggagcagagccccaccctgcaccgcctcgctcacccctgccttctcccttgcctctctggatgacagactgggcccctgctgccctctactcctctctaggctgctctcccaggtgtggggaggctggcactcatgcctccttccctcctcacccctgtcccccccggctgcacctggatgctgcgataggcagtgccctgccgaggaatggagggccgcccaggcccacactcgggccacgcaggagttgcttctggcrtcaagtccacacatttcagtgcaaacgcaaagcctccaggatctgggccaagctgccactccagcttcatcttcattcactgctcgtctgcaccacccacgggagccacgcacctttcccaactgcaccgacatgggcgctgggtcccaggttctgcctcgagagcccctgcacccccgccctgcccctggccctggctccatctgacatgacatcaggaccccccctgagagaccatgtcttctgtcaggcctcccctccctggcgggatcactcccttcccaatgccaggctgcagtcagcattcgtgagcacccaaaatatgccaggcagcatatgaggcacatggcacacgtggtctcacccgtcttcccaccagccgtgaagtgggtgccacgagcctcctcgcaggtggggaggaccagggcgtggggagctgacctcacagacacgtgagggtgggggccagggsctcactgtaacctcatgacagggaccaaatgctgccagatacagacaatgtttcttggttggtggctgctccgggggtggggggcgagactgaagcgcttttgcggccgagcaccacatgtcaggctgcgcacagcacgtggtcttcgggaaaagtctgttgaatgaagtgttctcgtttgaagacacatatcccttaacccctgagcctctactctagaaggaaggaggtttagaatgctctgtaacacgatgaataaaatggaagggtctgcaaagccaccatcctccagcgggagccccaggcccctggggtgggagcaggagcacaggaggagccctaggcagaaacccggctctccagggcaggcaggtcctctcagcctctccccaaacatctgtgaggaaaccgtgctgcagccacagtgtsgagacayacacccttgccatcagccaccttcctcccatgcagcaagctcgggcacacccagtgtagaggggagctgcgactcagtggacgctgacactgggcatyggtgggaacagacagcggtgctgtggctcctgctggtgggacgctgggctcggctgacrgtcaggaggcaacgcagctgygcacatccgaagctctcgacgtgtggagatgctttggcatggacactcgtcccctgacacttcatcctaaggacacaattctttgagatgtgcaaagaatgaagtgcgtggctgttcattacaacattgctcatgatgcgaacatggcacatgaagggatgtggatgggagactttccgacgagggaagccccttgcagaccaggcacccctgacatttctgaagaagcaaatctcccttgtggatgcrgcacccagagcaacactaatgggcctacaccgtgcccgttgtgtgttcttagcaggaattttctgtgccggggaacagctgtttctttctattcctttatatttttctaagacttccttttgccccgaagtcttctgttttatatctgtacctaaaataggccagagcacacacaccacggctgcatcctgagcggctgtgatagtcagctctgtggacccacgtccatcccgctgtcctgacacctccccgagcccccacacytacctccccaacatggggcctctgtcagaagtaatgagaccttcctcaactcgcgaggggctttcaccttgtcacacttaagaaacactcctgcgtcccgtgttttaggagagctagagccagtcacacggtgtcccctgcccagggctccgctgtcccagaaagactggaaatgagggtctcggctttgccacaggaatgggtgggattctgcctgtttctccatctttttgtaatttctattataaagagtgaggcaygctcaccatttgccgttatccttgaaggagtttctccccagaaagcgcttgatggagacgagggcacctgctcctggtgtgggaagaggtagctcgtggaagccacatgattcacgtgactccctcggtccccgcgtgcacacccatgcatcggtgcagccggggccgcagtgtccttggctcaggcctcctacgcagggaagcagggtcggccgctggatcacccggctgtgcagctgggatttgcccttgacccgggtgtgcaacaaggctttgtcctgtgggccgcacgcgttcccaaacacagagcaggagctgcaggaggcggagaagccagagtgacaaggtgggtttgggggtctgagggccccagaggtcggacattggaatgaccgattgcggcagccgagaaaccaagagtggctgcagtgtcaccgcggcatgatggggcgagggtagctaccaactgaacctaaggaaattcagttccatgataagccaagaagggtcaacagcgtctctcgctaacactgcagatatctggactggccccrgggcctggtccctggtggtgccatgcagctgagaagaaattgctcctataagcgaatatctgacaccccagccaaaagtcttattctttcccctaaattccaaaggaatttyctctctattttccagtcgattggagtcgtttccatcggtggctgtcttaccagtgggtgatgagtctgagaaataggaaccatgtcttatttatctgtatgaccccacagcagtaactattataatgcctcagacttaaggactcaataaatattggatgactagacagaaattaattaatgaacatgctagcttcctggtaacatatgtaacatctctcttggtccacttagactgtaaattaatgagacctttgaggaatgaagaaagtacgcgggcaactgcgggaaggccggagattgcagaggctgtcttcagagaggggtctggggagctctttcagccttgtcccgcgggccgagcccactcccccggcatacagagctcctcttggaggggccctgctgatggtctggccctgctctccgggggcgctcatgccttccactgccactggctgttattctttctgccttcatgccagctggagctcccggatgccaagaactggacagcaggcacgaagttctccgcgttcccaggaggccgggatgtgcaaagggcatggccggagccgggctgtcctgacagacatgtaagcacacagaagggtggcaggtgacctttctctggagcgcatgacggcagtgctgtggccttggccttccactcccaatgggggacttcccacttctcagacctagagagaaggcctcagggtcccttgggaagcacgatctccgctccccctttaatgggtcgagaatggagacgtgagtcaggcacaaccttcagaagtcctggcacgaggggcctggaagctcaggtggggcttccgtgaccacctgcggccacacagggcccagggccagcctggacgaattgtaaagggaccctctcatggggcttcctgctcaggagaggcaggaatgggagatgtgggtttggctgcaggcctgagcaggtgttggaggacaggggccatgcactggggaacacgctcctggggagaccccctcctggagcccccagggccagagacgyctgcaggagggagaggtccagaagatggctgcccaagaaacagggcaatgtgtggggatggaggcaaggggtggggcatggcaggctacagtagcgctgccacctgcaggaggcggagaggccacagcgacaaggtgggtttgggggtctgagggccccagaggtcggacactggaaggaccgattgcggcagctgagaaaccaagagtggctgcagtgtcaccgcggacgcctggacgtgctgagactcaccccggggccatggagagtggctgcagtgtcaccgcrgaygcctggacgtgctgagactcaccctggggccatggagagtggctgcagtgtcaccgcggatgcctggacatgctgagactcaccacggggccaccgagagaggctgcagtgtcacctcagatgcctggacatgctgagactcaccacagggccacggagagaggctgcagtgtcacctcagacgcctggacatgctgagactcacctcagggctgcggggcagacctggagccaggccggggactgcagggttgggaggaggaaggcgctctccaaacacgccctgtgaagccaccgtagaatcagactgtgcctccagcctgacctgtgctggccccttcctgtgagctccaggaaagtccgtgcttgaagagctcattcatgagtgccttgttttatttccttcacatgaaagcagagaacatgaattgttttaaaaatagcctctccttctacaagtcattatttgcagaaatagctgatagttcaaaaactctaaattcatttgccacgttcattcaaattgttctgatcttatcatctttcccaaatcccacatttattacagatgtatttattctttgtctcccctccctcctctatataatggtttaggagagattacaaaaggtaatttataacaggttaaaagagagacctcaccactcacagaaaaacgaagcattcccctccccagagtggagacgtggctttctggggaatgtggcycagggccctggccgcctgcccacacgcgtagaaatacatgaaatggctgcgcatgtttcagtcacttagagaaataccgaaaaatggcttcatataaacctctgaaaggtacgcggggtagcaattaatctccttccgtagtaaagagcccagctgctttggccatgatgaacatcagtctttgctcttgaaggcttcagaacaggtgtaacagggatggggcgcaggtgctggcccgcaggtcgggatgtgcctgctgcgtgccccggccaccccagccagcggtcctgcagcaaggagcagccggtgcccatacctggtgaagaggctgggttggccgctgcctggcctgagaggtgaggcgtggagctgtgtccacatgaggagacgcaagggagcgatttccatgaaggagtccatagacctccgagctctttctctgtagctcagctgaacaacgttgccaactagggagggcactggcttccgcggtcaattgcaggctcggacactcactgcaggcttagcctttgactaagtcagctgaccctgcagcacccaggtgcccacctgtgaccttgtggcgatgcatgtcccatgcaggtgctgagtgtccaagctgatgtttgcaggatacccacccgtggctcccacggcaccatcaggctgttgccccagatgtgcagttgttccctcactgggtcaccgacatgcctcttgcctccatgcactgagttcaggaccgtgaataagtgaggcttgttggacccaccaaatgtgctttttttagagatgcattttctcaaagcctcgtggatcgattttggtgatgctgtgaatgaccatctttgtgtctgtgagtccccgtgcagtgagaggtaacagcagtgttcctgcagagtctaagtggccaggcagtgttcctgcagagtctamgtggccaggcagtgttccygcagagtctacgtggccaggcagtgttcccgcagagtctacgtggccaggcagtgttccctcagagtctacgtggccaggcagtgttcccgcagagtctacgtggccaggcagtgttccckcagagtctacgtggccaggcagtgttcccgcagagtctacgtggccaggcagtgttcccgcagagtctacgtggccaggcagtgttccygcagagtctacgtggccaggcagtgttcctgcagagtctacgtggccaggcagtgttcccgcagagtctgtgtgaccaggcagtgttcccgcagagtctacgtggccaggcagtgttcccgcagagtctgtgtgaccaggcagtgttcccgcagagtctacgtggccaggcagtgttccckcagagtctacgtggccaggcagtgttcctgcagagtctgtgtgaccaggcagtgttcccgcagagtctacgtggccaggcagtgttcctgcagagtctacgtggccaggcagtgttcctgcagagtctgtgtgaccaggcagtgttcccgcagagtctacgtggccaggcagtgttcctgcagagtctacgtggccaggcagtgttcctgcagagtctacgtggccaggcagtgttcctgcagagtctgtgtggccaggcagtgttcctgcagagtctgtgtgaccaggcagtgttcctgcagagtctatgtggccaggcagtgttcctgcagagtctacgtggccaggcagtgttcctgcagagtctgtgtgaccaggcagtgttcccgcagagtctttgtggccatggcccacccaacaactgcgacttcttagcacgaggactcaggtgtatgagttcctcacagccccctttttcagcccaaggcgatgcccacagtgtcctggcaccacctcccacccccagcctgtggctgaacccaaagggatggccygggagctgatgggtcacaggccatcccatgtcccacgtgggcttctcaaaggttttggttcccatccctagttttggggcagtggctgtctcacatggggttagggtggaaaacagctaagtcagatcagagcgtggaaccccagagctggtgtagctgtacctccaggccgcccgctgccctgctccttgccatctgtgtctccccggagcatgcagcctgcctggagtgctgccctgggtgtcttttcagagtgcaaccctgcaacctcagcacaggagtctgtctccatcttgacaggcattgctgaagatgtaagtgctcccccagaacatcggggtgtgtaggccctccacgatgygctgcttggacggcggagaccgccrttttctcttggcagtctggcgctgagtggatttgcccaaagtcacagatcaacttgctgttgcagcaggggccggcctgtttctggagtggtttagatttgggatgatggagctatgatcagcttacaccagcgcagtgcctggcagctttagcagaagggtcattcactgaggtccagccagcagtcaacagcacttagaaaacaacaaccaagaagagtagccagcgccaagcagaaccgggggcctcccctcctctgcgagcacacagcagcctcctcatgcccttcatcccctatcactttgcctcattctgttttcctcttcttcctttatggtagcggggggactggcaccccagtgtccttgcatctgtgctggtaggttgctgaggggtttcccgcggccgccggcctgtctcccaacactccctgggcctcattcattcccaccacgaccctcctcttgggcgcacggcctggactcccgcctccagccctccccacctgtcggtatttctctcccaccctgcagggggtgcttttctcaaggccattttaagcacacatttcactcattcagagtgaagatgacacagaagccaccagattcaagtgctcagaaagcaggacaagcgcgtcgggctcagagctcttccccaggaagctggcctccaaaagcaggagacggagaatccattcaggaaaagcacatggggctgggcgccgttccctggggagctggcctcggaaagcgggagacccagaatacattcaggagaagtgatcgggcttggagccattccctggggaaatggcctcagaaagcgggagacctagaatctgctcaggagaagcgcctcaagctcagtgccgttccccagggagttggcttcagaaagcgggagacctagaatcctttcagaagcatgtcggactgggcgccgttccctggggagctggctttagaaaacgggaaacccaaaatcggctcaggagaagcacgtcggactgggcatcgttccccagggatccctgacttcagggccttttgtgccacctctgttagtgagtgtcgggattcctgcaaataccagatttctggagggtttggaatattgattttctgttgaagaaattagggtgagcattttactcaataaaaatcaggaatcacaattcctaaactcatagatttttctacagatcttaagcctccattgttattcctatagtagctcgccctggataaaatggagacatccctcaattctgccaagcagagctgccgggaaagactgaggtcgcaagcccagccctgcacagggcgaaaggaaggaccactcagactgtcctggcctgggtcaggtgccaccccacaggtagtaactcatcaaagrtgcgcagtttaacggactgtactatactgacagtaaaacgaactaatctggcatccatacactgtgtctgtcaaactcagtgatgcacacaggtttaaacattgttttttatgtgttttaatttttcatagccttctaacgtgacctgtgagaygtctctgcagagttgatgccatgaggtagtgagctcacctaagaatgtcatcgtcatatagtcagcaagaataagatatagaagacgatgccttcgtggctttacacacctcaaaatgtggasctgtatcatttatgtgattcttttaagacataatcactcaattgaaagcttggagcagataatgcatcttagtagccagagcttcgcggctgccattgtatttccgctccttcgtgaaggggagmgaggcgtgctctgcagagcagcaggtgtgtgccatgtgagggctggagggcacagccyacgagagctgcttcgtgggkctctcaccagttctgtggctccatgtccagaccagttctgtggctccgtgtccgtagcaaagctggatctggccacagctgtcgggaatgtctgagggattggcagagttgggaaagacgccggaataagagagttggacaaacattcagaaagggttacaggtagattgtgggaaccgcagaccagtgtgcttgccttggtccctggtgagatcctaggccgtatcagtgacggggagggagccgggcgtcacaccgtctctttgctgatggcatttcttgctgagagatggaggaacggctgttgacatcacaagtatagattttaatgatttttttttttacaaagtatccaaaagaaaagatagagacttggaacgatcatgccgttagataaatttctacctacgtacactattcttacaggctattaattaaataattacttaatgaggagaaaatagattaagtgcaaaggggttctctagaaacgtgccgtggggctattcctcaattctgttatattccacgatgttgtcaataatagaattaaagatgcgtcattgggttgagtaaacttttggaccatgcagtgctvggaggaggaggggtggatggagatgagggtctgagtaaggtctcccgctggcaccagaagagccctgcccaagtgcgaccatcagatggaaacgacctcaggggttttagagccagtgtgagtccactgtgttgctgatagcaggggatgcgcatggctcacccagaacaatcccgcccacagccacgttctgtgtggcccatgtgtgagctgcccgaggccgccctcaccaagtaccatgaacctaggggccttcaaacaacaggcrtttattctcccacagtgctgggagccagaagtctgagagcatgtctgaagctgtgctccctcctcctccagcctctgccagcacctgacagctcccagtgtccctcggcttgtggctgccccactccagtccctgcctctgtgtgtgacccgctccctgtgcacgtctgtctgtgtctgaatttccctttttttttttttttttttttttgagatggagtttcactctcacagcccaggctggagtgcaatggcgcaatcttgggtagccgcaacctccacctcctccgttcaagcaattctcctgcctcagcctcccaagtagctgagattacaggtgcccaccaccacgcctggctaatttttacattttaagtagagacggggtttcactatgttggtcaggctggtcttaaactcctgacctcaggtgatccgcccgcctcagcctcccaaagtgctgggattacaggcgtgagccaccctgcccagcctcaaatttccgtttttgatcaggacaccagtcctactggattcatggcctaccccagagacttcgtggtcacttgattacatctgtgaaggtcctttttccaagttacataacatgctgaggtcctggggttaagactcaacatatcctcttgaggggacacagtttgtactctaagagctcaatgagggttttcaaaattgagaaattttacataaataatacaaatgcctgatttctattttcttaatcaaagatctgagcaaccccagacccgcattcccagccagcagtacctgtgtgctctccccttggggtaggactggccgcccccagccacccagccccccttccacgacgcagcccctccccccactcatggtgcccccagctgcccggccccccttccaccacgcagcccctccccccactcatgtggcctgcccggccccccttccaccacgcagcccctccccccactcatggtgcccccagctgcccggccccccttccaccacgcagcccctccccccactcatgtggcctgcatggccccccagacactggaggctacagcccctgatgtctaccctgttgtggcccacgaaggatttagacacctcttaaaaggaatatatgcactaaatgaatgctgaaataacaaagtcggtagaaaatgacrgccatgggagagacacatatgccccctgaggttaacccggcagaactgctgcgtcccagtgasrgagaccagggtcccagggatgcagccagcttggccaccccgggggcttsycctcaggcctaggccctgcattagacagctgcctgcaaggccagaagacaaagaggagagcaggaggtctgccggggtcaggtgggcctgaggaagggaaggagggcatggagtgtgggcggagtcctcaggtcccaggacagcctcccacgtggtgaagggccaggactcccccgggctgcaggggagcacagacaggacccgtgtgcaggtgcacaaaccggacctccggcgcgtggggctctcgcgtgtaacccggctgccccggaacctccggcgcgtggggctctcgcgtgtaaccsggctgccccggaacctcyggcgcgtggggctctcgcgtgtaacccggctgccccggaacctccggcgcgtggggctctcgcgtgtaacccggctgccccggaacctccggcgcgtggggctctgcgtgtaacccggctgccccggaacctccggcgcgtggggctctcgcgtgtaacccggctgccccggaacctccggcgcgtggggctctcgcgtgtaacccggctgccccggaacctccggcgcgtggggctctcgcgtgtaaccgggctgccccggaacctccggcgcgtggggctctcgcgtgtaacccggctgccccggaacctccggcgcgtggggctctcgcgtgtaacccggctgccccggaacctccggcgcgtggggctctcgcgtgtaacccggctgccccggaacctccggcgcgtggggctctcgcgtgtaacccggctgccccggaacctccggcgcgtggggctctcgcgtgtaacccggctgccccggaacctccggcgcgtggggctctcgcgtgtaacccggctgcccyggaacctccggcgcgtggggctctcgcgtgtaaccyggctgccccggaacccctcctgcacatgggcgggctgagggccaggcgcaagggcacctgtgcccaggcggcaggcagtaggcaccagtccatggtgggcgtacagatggcagggctgaaagggaccctaaagatcctccggaagagatgtccccccaggggacatctgggagctgtgcacggtcctgagcggcttggggtcccaggcctgtggccctcactgcacagggttcttctgcagcgggaccccgcagccatgtcactctctgccctgggaaacatcctgtgccacggggcgggggggtgggggcggttaggcagcttgggtgatttttttattgtttgtagagatggggtctcactgtgttggccacctggtctgaaactctaggcccaagtaatcctcccgcctcggcctcccaaagtgctgagattacagacatgagccaccacacctggccaagagtgagttttaatgagcacacagtcactgtcttctcacatcagaagtccgtgtgctgagaaatgaggattctctttattctggacgttccagaaagcctmgtccaaggggatcgaatggacgcaggagggagagagctcagattttagctctttgttaggttcgtataacccaagtgccctgtgggttccccttgtgtggatgcttcctgaaactgtgtcctcacggccgaccctgtgtctcaggcgagcacccttctgtgggtggtggggacacacccatgcgtccgacccccacagagccacctgggcctctgtatgcctcacgctcctctctccagcatccacggtttgcccccagctgagggctaagtgagggaaactccttcaggctcacgttgtaaggaaccactgctcccccaaaacatccctgccagagccttgtctgctcactgatgaggattctgtctctgggctttcattgtccatccttgaattccagctccccagaatatccgacttgtatgtgtaaatctctgtcccagccatccgtggatgggccgggctgagtgctctgggacttcagaagcccaggcacgccgggctgaatctgaaggcgggtgtgtggcgcagcycctggagcaggcgtgttaaaccctaagctccttcccatgtagcaggaccgcccattcctgtgggccatgtggctgcacaacgtggagcgaggtcgaagtccccatagaagacagagctggggggctcgcagggaatttctcagaggggtgcccacttgggagggaaggagggtccccggcctctgtgtcactcacttcgtgctctagatgtccgagtaacccagtggtaaatgtccactgccagtaatttcccagcacctcattctgtcccacacacctcacttaggctctcagctacccgcaggaggaccaggactgaaagaattgtcaggggtcaaaatcgtctttgtcattttcttggaaataaaagtaagcagctcatttcagacactatgcccaggaggagcttttgtccagagctgtgcatggaagggcatcgtattgatctgtggcacgtatggcctccatctcccctgatgggagtcagcagggccgctctgtgtgaccacctgtgagagcctagattaaaatcccacccagccatgggcagcacagcccccgacccaggccctctgaccaggggcctcactcccactgggagaggcagaagccacagttgtctctctcggctcgctcctctgccgcctgagggtccagactgtagtctccagccccaggtggcttcccctccccagcaggagtgtcggttcccaggtgacagttatctcttttcaaagtcggtggggtgcaggctctagtagagaagagtagctgggagagcacgttcagctctyactggtggctttcatggagccatacgtggcttgttattgaattgtgactatgaccatctcatgtttgatgtaaaggataaagaaatgatggacctgtgggtgattatarccattctttggtttatggacccgtaagtctcacggagagcattatcaatcacacagtgccgtcacggctgcgttttcatgtggaatgctgaattgctttagaatgcataaagcagggagccgcttgtgactatgcrtgtgtggttttacggaagttggggcacacatgaggcctgccctggttctggtcatctcagacaggaacacggagctcatgaaccttctcagtctcaccgagagccctgggacggcccctccgtccaactctggagtaccttctgccacctgcaggtactcctgaatggccgagagccactcacaccactgcccaacctttaggatgatctggacagtccctgtggaaggaaygagtctctgtggccagctctgagtgctgcaggtcctggctgaagggtcgtgggcagatggtgatgcttgcacaagcagagagataatcgtaagrggacacagggtggcaccccgcctggaaggcagggaatggaagcaggagggaactggcaccagggagctggcagcagaggagaggatgtgcctgagcttcagaagggaaggcracactcagaggcacacggcacggggcagaatcagagctaaaagaaagggtgcccatccgaggcaaagcacctttctccagcctcagccctggaaggccactgtcctgcttacagggacccttccttgcagagcagccagcggctggccccagcggcccaaggcagatgcacactgctaagggatgatagcatctccactttgcagtgacatttgctgaaatgagatcataaaatccacaaggactttatttttgagagttaaaactagaaatgttaactcttgtggctacttttgttttaaaagcagcataagaaatcttcctctggctgggcgcagtggctcacgcctgtaatcccagcactttgggggccaaggcgagtggatcacaaggtcaagaccatcctggctaacatggtgaaaccccgtctctactaaaaatacaaaaattagctgggcgtagtggtgcgtgcctgtaatcccaactgtaatcccaattgggattatgggaggctgaggcaggagaatcacttgaacccaggaggcggaggttgcagtgagcagagatcgtgtcactgcactccagtccagcctagtgacagagtgagactctgtctcaaaaaaaaagaaaaaaaaaggaaaaagaaatctgcctctgcctgtaatacctgccgagactgatcaagtcttccctgaagcttttaaactacagcgggttagcattgccatccctgaagggtacttagcgggcacgtatgttaactgagcttatgacatcaattcatgggaagctaatatagtgtcgactctatcyccacgtgtgtggggggggtgtccatgcacgtgtgatgtgtgcttgagttggtgtttactatatgcctatgtgtgtgtgaatgtggttgtgtgtgtgctgtgtgtgtaagtatgctgggtatgtgtctgtgtgtatgtgtggtgtgtgtgtttctgtgtatgtgtgtgcgaggtacttgtctatgtgaatgtggttgtgtgtgtgcgtgtatgctgtrtctgtgtgtgtttgtggtatgtgtgctgtgtataaaaggacaacccacagcactaaacctgaatctatagattcccaggtacctgcgtatcagaaaatatgttttactattaagttttctgtgtccttcatctgtctggcattctggagggatgtggtccaccttgatccggaaggcaccggggtcagattcactcagttcccggcattctggaaggatgtgttccaccttgatccagaaggcacctgggtcagatttgctcagttcccggcattctggagggatgtggtccacattgatctggaagatactggggtcagattcgctcatttgctggcaatcaggagggatgtggtcacgttgatctggaaggcactggggtcagattcacccagttcccagcattctggaaggatgtggtccacgtttatccagaaggcacctgggtcagattcactcaattcccagcattctgggggatgtgatccgcctttatccagaaggcacctgggtcagattcactcaattcccagcattctggaaggatgtggtcacgttgatctggaaggcactggggtcagattcacccagttcccagcattctggaaggatgtggtccacgtttatccagaaggcacctgggtcagattcgctcagttcccggcattctagagggatgtggtccctgttgatccggaaagcactggcatgagatttgctcagttcctaacattctggagggatgtggtccacattgatctggaaggcactggggtcacattcgcccagttcccacatcgtggagggatgtagtgcatgttgatccggaaggcactgggtcagattcactcagttcccgccatctggaggaatggggttcacgctaatccagacagcactgcgtcagattcacgcagttcccaccatctggaggaatggggttcccgctaatccagaaggcactggagtcagatttggtcagttcctggcattgggaggggtgtagtgcacattgatctggaaggtgctggggtcagatttgctcaattcccagcattctggaggaatgtggtccacgttaatccggaaggcacctgggacagattggytcagttcccggcattctagggggatgtggtccacgttgatttggaaggcactggggtgagattcactcagttcctggcattctggagggatgtggtcacattgatctggaaggcactggcgtcagattcacccagttcccagcattctggaaggatgtggtccgcctttatccagaaggcacctgggtcagattcactcaattcccagcattctgggggatgtgatccgcattgatctggaaggcacctggrtcagattcattcaattcccagcattctgggggatatggtccgcgtttatccggaaggcacctgggtcagattcactgaattcccagcattctgggggatgtgatccgcgtttatccagaaggcacctgggtcagattcactcaattcccagcattctgggggatgtgatccgcatttatctggaaggcwctgaggtcagattcactcaattcccagcattctgggggatgtgatccgcattgatccggaaggcacctgggtcagattcactcaattcccagcattctgggggatgtgatccgcgttgatctggaaggcactggggtcacattcactcagttcctggcattctgggggaatgtggcccatgttgatccagaaggctctggcgtcagattcactcaattcataccctgcctcgcctcctgctgtgtgaccttaagcaggttaccttgtcactctgggcttcatttgcctgtctggaaaatggagggttttgttttgttgtgttttgttttgttttggagtctcactctgtcacccaggctggagtgcagtggtacaatctcggctcactgcaacctccacctcctgggttcaagcaattcttctgcctcagcctcctgagtagctgggactacaggcgcatgccaccatgyccagctaatttttttgtatttttagtagagacggggtttcaccatattggccaggctggtctcgaactcctgacctcgtgatccgccccctgggcctcccaaagtgctggattacaggcgtgagccaccacgcccggccaagtacaggttttaatggtgctcacctcacaggattattgtcagtttcacaaagagccttcctgcaagcatggaggttagtgctcgagcacagagttagacatttgataacagtcactgtcatttcatgagggttttttaattgtgaaaaaattgtccttagttacagacacacactctggggcttatgaagattactttaaatatttagtatatgtcaattctaagttaaaagtctgctttgcaagttacgagagcaatagaatggccgccgtaaactgcagtgaatacagatgcccctcattctgcttctgactccagtggttcctgttctgtcctggggcttcctcaggaggtgctgagaaggaaagaaagggaacacctgaggggcamctgccctccctccacgtgtgcccagaagcgaatgtggggagccaggaggtggtagggtgcccaggagagcgggagcagcatggggcagggcgggcccagccgagggtgggaccttcaggccctccattcccaagcacacacacgtggtctcttgcactcttcatcggtgatcatttttcctctttatatttgtgttacttaatcctattatctttaaggatgccttccacatttgtctgaaaacagaatttccattggcatccatgaaaaccaaggtcggagctcctagagtcaagatggtaataaaaagtagcagggcccctgagggtgtggatgccaccctgtcctgagcaccttacagccaagagctcccgggatcagttcattaagcccatgagtcaagtacattttattcccattttcagggagagaaactgaggcacagggcagtgaagccacttgcctcagtcacacagttagtggcagagcttcctctaaaccatggcagtgtatactgggcacccaatcgtgtgagtagaaacaggaatcttctaactcacagcatcagacaatctaaggaaagggattcctggtggcacctcaccccgcggaggatggcacccggagctgcagctggaaaaaacagaggccgtcagctttgggcgagtgagagcttcagagggccctgagccccacrgtgatcacgcattcaaaatgtttgctgcactcagctacataaatattacagggaaagagaaagtggagggcaggggagaggcagcctcaccacagccccggagaaccagagtgaggcaaatgtagttttccgggcctcctgacctgccagtctcggaatcccaaatccagagcagcggcagaggacaagsggccgcggggagtgaggggagcgtgctgaggtgggggttggaccgcaggaaccccaccaggctggccgggaacttgcctttcacctcctgcaggtgcctctgcctggctgagaagaagttcttttgtggaagacccacgctgggtgttcccatctggttctctcctggacggcttgacgttgctagctccagtagttaccctccactgcacagcgagttatcccgaaacttagcttaacacaaccatgttttatcttacagtttctgtgggcctggggtcctggtgtggaccagctgggggttccagctgcgtccctataggctgtgctgagggtgtcctctcagctcagcagcggcagccccaggccctctgtgctgttagcccctgtccatgggccctgtccaccaggtttccccatcagccgccaccacctggcagcagacatccctcggagctcgaaagtcggtcggggaccccagtgtgcgtccttagcagccatctctgctgcctttgctgtcctccaggcatcggagtggagtcaccaggtccagtggcgctcaggaaagagaattccaggaggacggaggccctgggccrtctcagaggctgccggccacactgacatttcaagaatgagcccgttcaatttcaggayactccctttgccacaggctcagtttaggagctcttcttatttctctatttttccaaactttcgatacttccttttctccccttcatcttaatttaaggctttccacaaagagctctatcacagccccttcctaagaccggtctccaacagcagcagcttgaaaacagctattttggcccctcaggtatgaaggtcccctagtgtttcctggagacacctccttctgacctcagctccttctgagggacgcggggccagaggagagaggagcagattcggcagcgcggagcagcaggacggcgggtgtttgaaatggcacacacgcacttttctggtggcatatgttgtggtattcatttagcaaaaatccatttttaaaaccctggacctgtagactgatcaacagatgaaacagtgagctgagctgcygcctgcctttttgtgttgccagagattattatccaccatatgctggaagcctgatggtgagcctccgccccggggctctcaccaacgccgcagcacgcctgccggtggacaggagcctrtggagggcactgagccagccagtgagcgtgggcaggcagccctgtgctccccactgggctgtgagaggtgcacacacctcagcttacttctctgaggggagacacccatgttcaccagcaccgaccaggctttctcataaactcagagcccgtgtcagttacaccagcacctaccaggctttctcatagttacaccagcaccgaccgggctttctcacaaaggcagagcccgcaacagttacaccaggaccgaccaggctttcttataaatgcacagcccacgtcagttacaccaggaccgaccaggctttctcataaatgcacagcccacgtcagttacaccagcacctacccggctctcttacaaacccacagcccgtgtcagttacaccaggaccgaccrggctttcwcacaaaggcagagcccgcaacagttacaccaggaccgaccaggctttcttataaatgcacagcccacgtcagttacaccagcaccgaccgggctttcttataaatgcacagcccgcgtcagttacaccagcacctacccggctctcttacaaacccacagcccgcgtcagttacaccagcaccgaccgggctttcttataaatgcacagcccgcgtcagttacaccagcacctacccggctctcttacaaacccacagcccgtgtcagttacaccagcaccgaccrggctttcttataaatgcacagcccgcgtcagttacaccagcacctacccggctctcttacaaacccacagcccstgtcagttacaccagcattgacccggctctcttataaacgcacagcccacgtcagttaagagtgagaagctttcatacctagaaccgcagtgctttgtgagtgggtcagagtgtaggataaagtctgcatggctgtggccacagaacttcgggtaggaagggtctgggggcagcgctgagtgacrggaggagacgcccctggaaggtgcatctggagctgccrgagcagacaccccctggcctcttagagtgtgtgtggtagaagcacagaaatggcagtgctcacacgatgcctgtgaccacattctatggaaaatagagaataaagaccaccatctttttgaaagactgatactattattgaattactattcaaagaatagtaactattattaatattattactggggggaggcttggaggctctggcggagacmcgcggagctcagactgcagagaggagtgactccaagcctgcctgagtctgtagctaagaacggagctctcccctgtgaaacatgccctcagtgtgtgggttcgcataggagcctgtgtgttgattgagattctgccactgaccagcttcggatacttcatttacctctcagtactttggttttctcatctrtaaaactggaaaaaaaaatgcatgaattccacggtttctctgggagtgaaaggaaataaaatatgggaaagtagcttgacaggatggagccgctgctgtcatgctgactagaaagtactcgcctgtctccacgtgtgcgaaagcgtgcgtgtgtgagagacagtgcatgtgcacatgcgtgaaatgatgagcagtccgtagcactcacatgttctgaaggtgagggactcagcattcgacctcaaacaaatgaaagkccccgagcccaccgctgagccagccagggttcctcgatggggagrgagtgtgcaggagagggtgagggtgccctcgcggccgctgaccaggggctcctggtgtggggaaggcatgcaggggaggtctggaggcgcccctgtgtgtccttggttgatcagatgaaagggagccagcctctgatgggtgtgaggaagggttggtggaattttcagggagggacaggaagctgttccagtggacaaggtagagatggccgaggctgagggtggtggatggaggggaccagaccccaggactgcaggaggccagccgccatcagcatagggggatggggaataaggtcagataagggatgacccgaaaaaagtaatgggatctgattgtggggaggacaaaagacaaggaagcctcaagcctcaccccaaagatggacattcaggacaggctgtcgtcatggaaactgggaaacccagtggaggaaaagtaactgactctgttgcgaacgtgcttggacaagtgagcctggtttttccgcagtgtcactcagaggtgctgtctgtcttagtgctcaccatgtctggggcactactcttttgaaatggccttttcaaatgcactcttaatggtggaagtgatatttcagatttgtttcttttttaatactctaaagccatttggagacaaggacagtcaactggaggagtgatgaggttaaggtgtggagaatcacaagtgaaaaagcttagaaaacrtaagactagatttctggttttctttgggcatatttctgaagacaattccaaatgggaatttcagaaatgactgagcaaggtcgaagtaggtatatcacttcctaaagtgtgtgaatggaaacatattagggagacatatagttacatgtggcagattcatgagggttttaaaagtggtctcagtacctgacagcaccctgttgcagattatatgctaatgtgccagacttgctagaatgccagcgtgcatcccaccgcactgaccgaggacatgcggcggctccatgcagttggccacttggcagctgagggtgagtcacatggaatcctgcaccaccaatgctccgtctcagtgacagcttaccctgaacctgctccgcactgtgtcagaatgaaaagcaactgggcagggtgcggtggctcccgcctgtaattccagcactttgggaggctcaaggtgggcagaccacccgaggttgggagctcaagaacagcctggccaagatgrcaaaaccctgtctttactaaaaatacaaaaaaaaattcactgggcctggtggcagacacctgtaatcccagctactggcagcagaatcatttgaacctgggtgtcggcggttggcagtgagccaggatcacgccactgcactccagcctgggtgacagagcaagactccgtctcagtaaaaagaaaaaaaagaaaagaaaagcaactggctgcttcctgaatttttgttcacattagatctaaatatgtatagacatatttgcaatataaaatcaaaaaatgtcacttgatggtgatcatttgattttccttctcagtagaatccaggtacaaaggtgagctttgtcaggctgttgctgttctttcatttaattggagcctattttcatacattaaaatatacatargcacttttcttaaagaatatgtgaacaggacatggctaagttatataattgtgaaacaaacatttacctgaattacctgaattattgttctacttttaattccaaagcaacccgaggaaaagtttccaaatattgtaatggatgtgtagtatgtaactgacaaaatatgtgaaagagattttaaacaaaaatagagatgacctggttattcttcacagaattatcttgtttcctttcatctgaacataatggcactatttagccattttcaaaaaagttagattcttgttcatgtggtaatgagtctttcttacaaacattcaatctaaggaattttagctcagttttgaaaagaatataatctagttatgaaaatacaatatatatactatactgaacatcaactattaaataygtgccttatggcattattctgtaaataataaaatattagatctttacaaatacgttgattaaaagtaatagatcctctatactagaatctagacagtgaaaaccggattcacctctagggagactgcactgtttataagtacctgtgcttatgaacagtattttttcaaaatgctacttttaatggacaaaactaataatagtaataatgaagccttgaggctttttctattctttgaattataactttgaagtttggggaagaaaagtctaaacatcccgacatatttgtcagccaatccttcaagcagaaatgtttgctgaaacacatacttggtttataagcacgtggtttcatgtaagcatgtcaagccattggtgggatatcaagtctatctcatcattgagttcctatttttggatttcaaaagcttcagattcatcggcatatgagccagcatgagaattaataataaaagctgagttgtgttggtgatttatttttcaaaacaaaaaatgacttgcattgttctgctttaagtaaagaattcatatttttcttgaaataaagtgaaataatttgaaaaaataattttagcatttctcaattttaaaataagggcattgattttatagctatatcttacatttgcactgcttacatttgcattgcttatgttatatctaacataagcaatgtggcaaaatcttatcttaaaaatcttcccagttcatgaatttgtcctgtgggataaactctgcttccagtatgcatgggtagatggtgagggctctgccaagacccagtatgcatgggtagatggtgagggctctgctaagatccagtatgcatgggtagatggtgagggctctgccaagacccagtatgcatgagtagatggtgagggctctgccaagayccagtatgcatgrgtagayggtgagggctctgccaagatccagtatgcatgggtagacrgtgagggctctgctaagacccagtatgcatgggtagayggtgagggctctgccaagatccagtrtgcatgggtagayggtgagggctctgccaagatccagtatgcatgggtagacggtgagggctctgckaagacccagtatgcatgggtagacggtgagggctctgccgagatccagtatgcatgggtagayggtgagggctctactaagacccagtatgcatgggtagatggtgagggctctgccaagacccagtatgcatgggtagatggtgagggctctgccaagatccagtatgcatgggtagatggtgagggctctactaagatccagtatgcatgagtagatggtgagggctctactaagacccagtatgcatgggtagatggtgagggctctactaagatccagtatgcatgggtagatggtgagggctctactaagacccagtatgcatgggtagatggtgagggctctactaagatccagtatgcatgggtagatggtgagggctctgccaagacccagtatgcatgggtagatggtgaggaatctgccaagacacagtatgcatgggtagatggtgagggctctgccaagacccagtatgcatgggtagatggtgagggctctgccaagacccagtatgcatgggtagatggtgagggctctgccaagacccagtatgcatgggtagatggtgagggctctgccaagaaccagtatgcatgggtagatggtgagggctctgccaagacccagtatgcatgggtagacggtgagggctctgccaagacccagtatgcatgagtagacggtgagggctctgccaagacccagtatgcatgagtagacggtgagggctctgccaagayccagtatgcatgtgtagacggtgagggctctgccaagacccagtatgcatgkgtagatggtgagggctctgccaagatccagtatgcatgggtagatggtgagggctctgccaagatccagtatgcatgggtagacggtgagggctctgctaagacccagtatgcatgggtagacggtgagggctctgccaagatccagtatgcataggtagatggtgagggctctactaagacccagtatgcatgggtagatggtgagggctctactaagatccagtatgcatgggtagatggtgagggctctactaagatccagtatgcatgggtagatggtgagggctctkccaagacccagtatgcatgggtagatggtgagggctctgccaagatccagtatgcatgggtagatggtgagggctctactaagatccagtatgcatgggtagatsgtgagggctctactaagacccagtatgcatgggtagatggtgagggctctactaagatccagtatgcatgagtagatggtgagggctctactaagacccagtatgcatgggtagatggtgagggctctactaagatccagtatgcatgggtagatggtgagggctctactaagatccagtatgcatgggtagatggtgagggctctgccaagacccagtgtgcatgggtagatggtgagggctctcccaagacccagtatgcatgggtagatggtgagggctctgccaagacccagtatgcatgggtagatggtgagggctctgccaagwcccagtatgcatgggtagatggtgagggctcttccaagacccagtatgcatgggtagatggtgagggctctgccaagacccagtatgcatgggtagatgktgagggctctgccaagacccagtatgcatgggtagatggtgagggctctactaagatccagtatgcatgggtagatggtgagggctctrcyaagacccagtatgcatgggtagatggtgagggctctactaagatccagtatgcacgggtagacggtgagggctctactaagatgcagttgtttcactgccctattgttgcaatggacttaccttcttttatgatgaataaggacttctcactagtgtctgatgctcttccaaatattgtccttgaaaaaataactactggtggttaatacatttcaactcagagtcatccatatttgtctgtggaartgtctttgttcttaaattatctcaatgccaactactatgctttactaggaggctgacctctcaaaacatcttgttttcaaaatgcactcattgttactttaaaatgttgttttctttaaatatatgcatgaagaaatgccttatacacatacctacaatatttttaaggatctatttttatttttatattataatagtaaatactttttaaaaatrgatttagaaatcaaaagtattttaaatactatttgtgtactgtaaaattataaattactgtcttagtttaaaaaacaaaattgatttagacttctgaaatcaagagtctcaggtgttttttaaatcattttctaccttaccatattattttaaattcctgaaatatgtgttttgctttataakaatcatgtttcccataacagtctttctctattttgtttaaaaatacattttctttgataatttagtgcatgggatatttattctaatcacttaaatgtgtaatctataacaatttggtgttccttaaattgaaaatgagattcttatcacagaacattaggttttacacataacaaatgtgaaatgcactttaaaagaagtattggcaggatcaacaaatcatttttaaactatttatattgtgtagctattttgtaggtcttggagaattttacatatattatattttttattcatcagccaaacaaccctaacttctatatgaataatgtactcatttgtcatatataaatgatttcaatcaacatgtctctcaaaaatattttgtgtcatgtttaaaagttttctctgaaaatgttattgaaatcatgtaaattgaaatttattattaaatgaagtctaagatctcatgaccaaaaaaaaaagaaaaaagaaaaaatcctcacatcattattcattcttcaaattagctgaatctagtctcacattattgccgagacacttttctaaagtattttcaagaattagaagatacattttcctgccctggaaataaaaagggaatttaaaataaagaaaaatagaatggaaatctggcgagtaacttaccagtttctgaagcaatagactaaaagaaccagcacctcaaatacaaacgcgttcttctcatgacccccctagactctagggcttagagtgtgggtccgccttcagctttggcgaggccagttctgcagccccactgaggtcaggccgcaccttagaggaggggtggtgggaggaaggggagtgagttggaggctctcagacataaataaccgtctgccacccagaatatattgccgcaggtgcaccaaggcgtggacgaggaagkgtgctgttctgctggtgaacccgcatggaacctttcaggccctctcacgatttttaaagtgacccaaattgaactgaattggtgccacctcccacccatctttcctcaaagcactagaaagacaggtcattaaattaagatcaaatcaggaatgcggtgctttgatgttggaagtgaaacactgagacaacggaagaagggactaacgaaaagaattgtatttatttgtgtattcactgtcaggtcatgtctgtgaagaaagcaaaaccagctctctggcctgtactaggctccgccttgctctggggtcgccggccccgtggccgccccaggacccccagacggcagggtctgcgtccccctagccctgtccgaggcccagggtggccrmgtgcggtctgcgccgccgtggagactgaggggctggacacggcctggccgagggagacggctaccggccactcctggccacctcggagagctcccggccgcctgctggagaccccagcctggatgaggctccggcgatccagggcgaggagagccgcgggctggcggggaaggtggtgcgaggtcgccgcgggcggggagggtgcgccagggcccctctggcctctgcccggagccggcctggccgggagctccccgaggcgacgcgcggttccccagctgctccccggcccagacctcaggtgcgccgggcgctcgggccgggcagggccatggtgggggcgccgtcgcccgcccctgtgctccgggtcgctgggaagacccgcccactccccggtgccccaaggccctgcgaccgcagcgggagggtcggggcagcgagggcaggatgccccaatgccccagcggccgatcccggggcctgcgcgcgttccccgagcctaccccgtcgccagcgcggcgcagccagaccctagggcgctcccagcaccgcggaggtcgggcctccagtcctggaggggtttgctctgtcgccrccctagggttctgcgatcccctcccagcccccgcggggagtcccgggaacaccacgggcacacacacatcagacacgcgcgcacacacagacgcgcgcgctggccgttgctatggagaggccggttaccagccaggctgagggcagcaggtcccctcctccgagccccctcccctccccgtcccttctctccgctgtcttcccctcttcccgccccggctcccgagtcctcctcccgccgtctccggccccccgccccccagcgccacctcccctcccctcctctgtctctgcccagggccgggcctggggtcgccctggagcctggctggggacgccgaggcaccggaggagggtggcggggagggacaggaaccgctaccactcgactctttgcccgagaaggtccctgggagggcatcccgggcgctgggggaacccgagtaccgcttctctctgacctgcccgccgccgcgccgcccccgagccagggtgcgggggtttttgcgggccttgccctgggcaggggggacgagagggccaaggtgatgtaccccgtccccgcctactggaggggttcactcatgggcagaggacgccagtgacgccgcagtttctcgcctctcgcgcccccgccgagccgcaccgggcctcctgcagcccgytcaggcctgcgggaaccatggcccgatgcgaggccacttctttgccctggagctttatgaagcgctctggccttgccctataaatacaaaaataaatgcggaactcagcctgggcctgcagtcagaggaaacggggtccttcggccacttttagacaggggcctgcagcggacggcaccgtactcatatctgtggacmacccccgcctctgagccctgccccctggggctcgcccccaggttttacagaactaggtttgtgagagaaaagcgccaggcaaggccctctgcaccgagcaggtctaggggcagcgccagagtgcaagggaggggaggggagactgtggaagcgccgcctgggcctggcctggggaggtggggggtgtggaggagttggccccggaggggccgggagcgggcgccgcgggcagccgggtgtgcggcgggaggggcgtcgagtggcgcgggccgccgtctccagctgtcccgggcgcagggaacaatggccaggcggtgggagaggggggcctaggagggggccgctggggtttccagaaaaggagaaactaaagagccctccgcagactgtcatctgcgtgtgacaagatctgcgcccccctcttcctttcttctccttgttcctgcagctgtgggcctcggagagcgcattgtacacacagatgttgggtttcagctctccggctctcgccagctccgcgggggcgccgcgcaccggggtgccccaacctgtggctgtggcccggggtccagggcctggggagagagagcatgggcgggaggcgcgggggggaggtgctcagtggtcctagtcgccccgagaccctagctcttctcgcccgctgcgggcctgactgcgccaggggccgggggttatgtgggcaggctcgaacgactgggagcgtggcctgtgattctgctccactccttkcgcccgcagagcggtggtctaggccagaccattgacctgggtagggggaagggcaaggacgcagctcgcacgcctgggttttcaccgccgtctcccttcggcgttttgggctggcggccgacattggcctggaccaaatggtggcaaagtctcaccagttccgcgtctcgcaagacactttctacgcgcatcgggacctaaacactcgggaggaccctggtaaagtgagcagaggggctctcgtctactcgccctgaatcattggcctgcttccatttggaaagggagcaaaaaggcccgaacggcaacactggaaaaggtaactgggaagaacgatatgccgtgcaattttctcttgccaagagtggcgacgcaccccacccacccctcccaggacaaaggtcacagcagagccgcgcgccttgacttttctggccgaggtctctctcccctcggtgctaccctgaacttgcccagtatgaacgatgaaagggagaaacactgaaaagaaagaaaaggcgaaggccctggcttcggcgttgtaccaatgactgacaaagctgatgtccattcatagtctcgggcgggagagggtgtttggagagccgcggccccttagccaattgctgtcagcaacatgtggggggggggggggacatcgctatagcaaccggtggctgggccgcgagccgcgccgccgccggccgggtgcgcgccgggccggatataaggcggggcgcggcggccgcgctggttggtgctacgcgcgcggccggcggccctaccgggaccgtccggagcccgccctgagcccgcccgcgccgcgccccggcccagcgtgcctagcccgggggccgggccggggcggagcacgcggagctgggccgagcggccgcgcagagctccggcgcctgcgggctccgagcccgtgccgccgcgcagccgctgctgctggagcagcgacgcgcggcacctttgtctcctccggccgccctagaagtttgtggtcagaagcggatgaccccgctagtctgtggctccagcgcagggaagcagctggctgtgatgatggcgctgccgctacccgcagctgctgcgccccgaggccgctcggcccggcgcacgcccccacctcctcccgcgcgggcgctgggcgccggcccagctgcaggtaaccaggggtgccgggcggggcgcgggcgctcgtagtgcggttgggtgggccctggaagaggcgagagaggctgggatgggggcggagggagcaggaagggcccacgagagcatcaccaggcgcgtaggtggtggggcgaggaagagagctttcgaaggctggagggcgcgcatgggggctctaacgggcaactagggcgtcggagagctcagttcagggggtctctgcctcgccgcaggactcctgtcaaaggcttgggccggcaggggagagctgcgcctgggatcatccccaagtgggtctagggtgggcctgtgaggaggagcgggcaaagggcagctccttctgagcgcacagatttggagggttggcagctgtcctggcccagcgccccgcagagaccgccccaaggagtctaggacctccgggacttctccccagcgctcttctctcggcctttcgcgttgctccccactccctgcagttccgaccattgcagggtgctgggggtgggggggtgcaggcacggagatgggaggcgtgtgggaaaggaggagggaaggggcgagcagccaggatggagaggcgccagtgtgggcgcattttcctctcagcccattttggggcgctcttcaccctcctcaccagggtccgggagcgcgcctccgagccatgggagtatcccagcgggcggcgaattgcagggaaccgagggggcctgcagggagaggcgttccagaggcaggtggggacgcctctgagaggccatctctcctcccccaaagagaactgcgctttctcagcgcctcccccaccccaggtgaggcggccgcgtgctcgccagagagaaacttgtgactggacccgaagctgttggaacgagggacttcatttccttccttcgtaactacctgtgcagttccgaacactggcctgctccgtggttttagagaagcgttgctccagggaatcgggcgaacccccaagttagagttaaaatctcagcacaattgccttttagggccggagagagtctcccgccctttttggtcctcagtgcgctgagctgggcgctgcgggctggacggctgggagaggggccccgccacagccctgaggacgacgcggttcaagtcaccgacctccgtcctcggacagcggccccggggtcccggacgtggtcccgcctcccgagctgcgcgtcccggccggcaccgtggagccacccgcctggagtccggagcgcagggtgtccgaggggtcttcgccaaaccaggctgtccttgcgtcgccgatcccagattttaggacgcgatcgaacaagagaggaagtgaaggtttgtgcggaggagggagctggaagctcttcctttcaccgacacagaggaaagtgccctcccgccccctcccaagcacacccctctgcgctccagagaagacggcggcggtggcggctgcgccgcccgggggctgcgagcgccgggattcacgggtggacgcgggcgtggttggggaccttggtcctccctcgcggccggcgcgctctgtggccaggaggctgggccgcagcaccctccgcgccgggacccctctcctggctctgaatacccgcggctcccgggaacccttggcctttgtgtccggcgctggggcctgatctttatgactcctgtggggatgcggtgaaccggcgaggggggagggacggggaagcgggggagaaagcccaggcaggggacggggccgaacgctgaccctcctttccctcgccctctgctcaaagtcgtgccacagaggggttctgacaagcgacgctaggcgggtcttgggttggggcttctgagtccgggtagaggaggcgaagcggtaacccccccagtcctgaagagggtctggttcttgcggggtggggaggccaggccccgtcccgagaagcacctggtgtggaaggcgcgcgtgcgtccaggcaggcctggggaccaggcgggcgggccaaaaataggggtcaggagccggtgccttaagtgtgatccgctgagtctgagtttgggtgtcatgaaaacgccagcggagagtctgaaagaggctgggggcggctttctcaggggcatccttcccctgctcagcctctgggtccctctctcccaccggaggcaatctgctggttagaattagtttgcacaagggtgcttccccctttggacatcagtatcataaatcttccctgatgtcttaaaacacagtatttctttaaaactgatgttttaggagtgcttaaagatggcaaatagacaatttattrcctttcttgtatattcacttttaagtgtatgcctggaaaaactcaacaaatagcccattttaaaacagtatatcccaacttattttcattaaagtttacatttaagaataatttttccttgaagattcttttcttttgcttttttgggttttttggccacttgaatggcagatttgcaagtacaatttcatctgcacggaggaacaatagctttcagttgcacaaagggcttctcccaccctgaattcagaccgcagtgcctcttgctctgataatagcttctgaaaagattttgtaatgcagagaattaatacatgattatttccgcctgacttctctcatttattagaattctgtggcaaattccaaattaaaagtagttccgttaacagctttaaaaaatacttttaaaatattttaagacaccccttcccccgtgttttcaagttggatcacttgctatggcctgaaaacttaaaatgttcatcagccctaaagtgagtattatattttagtaatgccttttagtaaatttagaatgaaatttcctaataattctaagaggattcatccagcaaaccaaagataaacttgttacagcaactcattaatggtctctaaaactgacttctaagttttaagagaaaaaggtatttataatttagtaatttaaatgcacacaaasataggatgaggctgggactgaaatctgattccttagaaatgatacaaatgaaagcatcaacaatgttagaagtttaacattaactggcaccgagcacctgtatccctacgtctttatgatgcaagcatattttaatactgcacatcgtgactcagagaatgaactgctcctgttaactggttatatcacacaaccttggaaaaggactaaatctggctacccgtcaacacatatttaccataaagttttgtatttgtgtggctgtatcagctctcacaattgagtttgggcataacatgtccttttttcttttcttttaagcttaccacatggacagctaaaaaagttctgaaggcattttcccgtaaatggctcacaagggcatggggtggaagcctcatgcacctccactcaggggcatggtcaaaataatttaaattggtcaggacagtgtctgcagatgctaatttctaagacagctccacaaattgtctctgtggtcatacacttattttgaatcacaacttttgcaatactgtctattctaaatttgaggagttgcaggtgcagacggttgagaggaagaaatatgcgatattgtacttcatcttattctcaagatagatctaacctgggataaaattaacttaatcattcctgattatttttttaaattatactattcctgcctctgagaactcagcactgaagtgtgcctatctgtgcatctcccccacccgggacgcacccctgccgctgtgttaccaggcctccttctccctcctcctcctcctcacttcttctctgttccaaactttcagtcattgagctgccgctgtacagaagggggtgttccgcttttcaaaaacgcctgactgtaaatgtcaaagtcataaatatttaaacataattttctttcaatttcaagtcaagactgataagatgcctctaattagtctgggctctctttggggtccacccgccgtggtgcagccttggggggtcggtgcccatgggggagatggcgctgaggaccaccaaagccacacctgggtcaagactgtgcctcaaactcacttttaaactcatttctttctcttaaaggccatggctagcaggagtttgaagattttttttaactccacaaaaagggagtcaagtcattgtaaagttattggaactcaatcacttagaaaaaaattctttaaatcttcgtttcttccgggattcctaagacctgacttgcagccaacagtttttccctccgcatcaccctcctgctcagcgctgggtgggacacttgaaaccgtcctgggcgtggagggaagacctctttcttcggtttcttctgyggcgcccgcgggcgggtaggaagcgggtttcccagccgggccctgggatccagcgacttctgtgtcaggccggtggaccccagtcggtccctctgtccagcgtcccgcccttccctgcagtaagaccctcctcgccctcagccccggcgctgcccgcggtcacgactccccggctgtmcaggtcccgcggccccgcgcggtcgccctccgggcctcccccggcctctcccaggttgcaggaggggcctccttgtggaccggcgcggggaggtgrgcctggggcggctcccacccctcctctgctgggacagcgcgggcctaggcagcagggagccgggcgaggttggtggagacaggactccagggcactggggctccttgcttcccctccggggactcctgggacccagcggggacccgggaggagagccaggagctctccaggcaatcgctctccttgacatttttctttgacctttgagtaaatccaagcgcgccaagggaggcctccaaagcaggcccggttccgctcccgcgcgtgcggagcgtgtcgagggtcccggcgacagcaggtgtctgcctccctgggaacagcctcggctggccccgggtccctcctgccgcccgcagaccaggcctcctcctccggcccccgcgcgtcccctgccctcacctggcccgagtgaccgcgggcagcgcctgtgccccttcctcggggagccggagccggcggtcgccctgcgcctcggaaccccacacacccgcgcgcacagcctgggtgccactgccgggtccgccacacgccgtggccccgccgccccctcagaaccagggtggtcaccgcgcgcgtgtgggcctcacggcgcggggcaggaaggttcgggaagtccctgttcccgggcgcagtcatccacgtgagcgcgcggtgtcctcccgacgccggggcagcggggccggggtcgcctccgcgctggggcggatggaggcgcgcgggggccatcggcccggccgggatgaggggtgggagggcggcgggcgccccctccgccggtcgcgccgcttcctttgttgttcttgttccgtcggccaaggccaggcgggacccgcgggaggcgagaggcgaggggcgaggggcggcgaggggcgcaggccgggcccccgggaaaagccctcccgcccaggtatggctccgggggacgcggccccgcaggcgaacatggaccctggggtgggcagaggacccggcccctgtcccggcgccgcttggacccacacgcctctcgcatccggggtcgcggccgctcctccccgcctggggccccccgcgcgctgtagggtccctcgcgccggcccaggagggcacagggcggggctgccgcccacccgggagaaccagcgcccgcgcggggaccgaggagaccccggcccgggggaggtggcgcgtggccggcgccttaggtttcgtgaacgggctgtgcccggggaggggcggggaggggcgcgcaggagacccggtgggcggaccccggcggactctggggctgggtcgcgcggctctagagtgacttctttctggaagaggctgtgtgggccggagggaggggggcggaggggaggggaggggaggagaccggggagggggcgcggaccggatctccacgcgaagggcgacccggcggcgagacccagcggtggctgcggggtccggaccaaacggggttcgggccgctcccctggttcccgcccctcctccctctcccggctccctgctcactcccctcccccaccccgcgcctcctctccctctcccccctttccctctccctccccctttccttccctccctctccaaagcctccctccctctccgcggcggctccaccgcctcccgccgctggagaacctcgcggtcctcctccgagccgcgcatccaggcaggaaaatccgggcgtcttttctcatttaacccgcgtttccattaactcagtcccggcaccagctaatccgctgcaccgaaggcaaaaggaggctaattaatgaccagcttttccagtcaagaccggcgataattgctttggtggcctttatgattacaagataaaaacgggcccggcctgacataagaggcactgtgtacgctgggagacgggaggaaatgaagagttgggaggctgaatacggagcagaaaattactaatagaagagagataatgaataggccggccaggcattcatggggaaaaatccattttgttaccacgcgaaattaggtggtggaaaggggtttgctaattgttctcatcttgtagcagccaggaccaaggccgggcgtgctcccccattcactccccgagtcattgtgcagggcgcgcggtctgcggggcggccttcccattttcctgtggcgtccttaattgttgctaatataccttctaatgaagytaatgaggggagagccgtgcaactatttgcacgtggagacaagtgaaatgcaccgaaagggctttctcatattttcaccagccctacccccgcccyccaagaagcagtgagaatctgaagggttttcctcgctgagaagtgaagttccaaaggctctgcagctyctttcaaggaaaaatacgtaggtgcrtaggtgscaagtgttgtggtctgcaccaggccactcctggagagtgactggagtcaggtgggattcgaccagcgctcgcctttcaagacaggtggatccaaatcccctgacctgggagggagaatgttctgtgaagatgcacagagccagtcccacgttcctttgttgctgaagatgtgctggacttggtggctacttgaagctgcagaaggctccgggcctgcccaccctcctccaccgccaagcctggcctccccccagcacccccgacaatcattgtgcaagctctggacaaactgctgtgcccggttagaagaagggatggatactttacttaaggcagcaaattagctgccaaatacgttacataaatttgaaaaacagccaccactgaaggaaaaagtgatgcctctgactgtcctcttgagcacgctgcaatctgcgatgtgctattttcaaatgatttctgcttctyctttgacgggggttgttccgcagggccctcccgttgtggctccagggccagcacagcgtcctgtggggctgagctttccactttcaagttgcatttggagacgtgtgtttttaggaggtcatgctttgtcaggagctaacacacccctctctccttgttctgcagaaaagcaaactcaagttcctgcctcctcaggcggagcaagaagactccaccaagttcatcgcgctcaccctggtctccctcgcctgcatcctgggcgtcctcctggcctctggcctcatctactgcctccgccatagctctcagcacaggctgaaggagaagctctcgggactagggggcgacccaggtgcagatgccactgccgcctaccaggtaagaggagactttttaaaaagtggtatatcggatttatctgttgaacaggcagatgatggcgttcctctctggcccctcctccattcccagcagttgttcctgtatcatagtttggggtcttttatgaggacagtttggaacttctcatcagcattcgtgcaaatacgttgcagccacagttgtgcagctctgtatccgtctgctcttcttggatagcctcgtgttaactctggaagaatgttgttaattagaagtgtggaaaaagtacagtacatgaatgatgtattatctgttatcttagtttggccactactactgaaaagtgccagagttgcgagatcatttggcgtgtaggtgtttgaagatgtctcaaaaatcatcggcttcctcgggrtcttctgtgaaaagatcctttgacctgcccagttgccaccctgtgctgttgtccggtccagtgaagcctaacgctgaccaggggaaggtgacccacacgcgtccccatgagggacaccttctctagaggcaccacagacacccctggaaatgagctggaaaccggggaggatgcgaggaaggcaagttcagaccaagtcgggcatttttaaaaaaccacagagtttctggaagttctatggcgcacatttcgtatttagtattgtcctgtaatgaacataggccttcggttttaacagcagcataagcccagaatacttacaccagtcaaggcgtttgattcctttgcatataaaatatcatttaattccgagaagatattcccatctgggaaggtaggatgactccttaaccactgttttaaaagtttggtcagtacatgtgtaagatttcctcattggactggatcctttgttttctctagtcacatgattacagtgtgcaatacgtcttgtaaataattcatcatttttacagtcgtatgtaaagtaaatatkattattccatcatcagagttacatgggtgggctctcaagctctctccacaaagcgccctccagcaccataccctcctgctgcctgagctccttggagctagcttttctatactctgtgagctctcaggaccctcccccacataaggaatttacacaatctctatgcttaaaagagattgaccacaagacagcttttcctcccrtttcaaaattcctggtattgccattgaatggaggaagcctccagttttctggagagggtcaccagcccggtcaggacgatctttttcttacaaagaaatggcaacttcaaatgtgttgaggctggcatttcagttgcagtgcatagctttgcttcaaagcaaaaggaaaatcacgtttgaagaagcagcctgaaaaaaatgtcacataaactagtaagaatttatccagaaattccattgagcaagaccttcaatgtaggatgccaggtcttcaggccaagtctgtgtcagtacataaataaattatcacaccagttctgttccatgcgtgagagacggaagatcatacaggcagagatttttagaaagcgtggcgccctttgatatactttgaaattcaaatataaaatattgatagaatggaaaggttggacttgcatgcagaaatgactaatttgaaaaaaaamctgcaggttgaaaatgcatacttaggactgagtttgtgataattaacagaaaaaaaaaagccttcccagtgacagctctaattaatagtatctgtaattaaaatcatgcccttccagcaggaaaattgtttgaatttcttggagtgacctttttgctgttcctcctgagggcatggtggttaagttgatattgattttataatgagctccggtttgtttaataagaatctgtaatccagacaataaatgaaatgtgtgcttttcttcaatccagattaataaaaaggraaaaaaactttttttctttaaaaatgtgatctaggaaaatttggaaatgaaatgagtgtaaagactttctggttggtttagctttgaaatcaccacaaaatgccctttaggrmagtactttgattaaagtgggggtttgccccatcacggtggattgtttcccggtgagaaagttctaggtgccgaaccattgtgttgttgtgatttgtgttttggcggagcaggacgcagtagtgaggatgggactgtatgattgttcactttgaagttagctgagtaacgtgtcaaggactcagacaattgcggttacaaggaaaggatatttactttggtaaatgaagcaggtattaattcattaacrtatccatatctcacttgggttttctatcacagccatgagtcccctgtgaagtgtaaaaatctgtttgaaaagttttttaaaatattgcaaacataaaacaaatttcaggaaagrtgtcttctcgcattaatgtatttatttctggctcactgaacctgtgtactttgctgattctataatcacagtgaggttgtggatgataactctcatcactgggttacaaggaaaatggaacaatttgatcttatgctttatttcatggggacatgytggaactactcaattcattgtcttaaagcttctgaaaaataaaaagattattgtgcaaggtaggtgagaggtaggtaacctcggagagagagaatggtaggtggcaatatcataagttttattaatatcagaatatgaagttacactttaaacaaaagaacttgtgttcttacctggggaaaggaaggtcaggagcagaggtgttctgatggagtggaggagacgggtgcgtggaggtggtatcctggggggcactggtggcctcagggtgtagagctgcgtcctccctggggttccaaaaggtgaatcctcatgtcctctgttaaacagcagctgggttagtgtcctggcaaggcacttcccgcrtgacctggggggccctcatgttgccaacctctgctaaagcatttgtccgcctcagccctgataatgcacgcacatcattagtgcttgtacagaaccccccmgccccgacccctgtgtgtgtgagtcagagcctgggcttgggaccacagggggcccacgttgtgctcctggggagtaagagagcttttcttaaaatagttttgaagcagtaaggagattgaattactagcttctaatgcaaacaccttcaaacatgtttacctgtttttcctcaaaatagaactatttcatggacagggtcaggatgttagagctttcttcatttacatgagtgtgatatttttgtttgccttacctattggaaaagcaaatcttttttgacagactctcatatttttgacacttaccaggatatcaaccccatcagataatccagccaagtttaatttgctcagactggagcaaaaawtgggtgtattaactttcagaataactgaaatatattcttaaaggtcatttgtttaacagactactcgcaccaaacttctccccattgttttagtaaatgttgttttttcttctaaatagataaaacatgatatatttggattaattctgtacttcatgatgtaaaaatccaattttattgacttttattcttttttttcaaattggcatagcctgtcatatatgcatatatgtgtgtatatatatatttatacacacatgtayacacacacacactaaggataatgtgaagacatggaagaattgtgatttttggtaccagtatactttatgcattcttttttcatgtaggtgtcctatttctatggaaggtgattgggtaaaaactgtgccaaaaataagttgttagatgattagaagacattctcctccttttctctcggagtctctttgaatgttgcatccatttccttgaggctttgatcatctttgagcagcaagtttagtattctgccagcccactctcccttccccgacatgagggcagagactcctgcagaattttcagcaagttctcttttgatggtttatttcacaatacccagcaggtttccttgtgtacttggaggcctttggaaccaaacccagaggaaagcatgcatccgggccacggggacctcctgtaaacacagcggctaagtgcacgtctcggtcgctgctgctgctcccattagcaagtgattacaaaggcagtgacagtgtggtggcaattgctgcgatctgagggtgctcagttgactggggctggcgtgtctgcaagtcccaaatgcaccctgacttcttacccccggtgcagaaagctgagttctgacaaagagcacaggtcacgccttggttcattctctggggctttaagagaccgttctttctctaggtgagtttaatcttcaggcattggtgtaatcacgagtaatagaagtaggatgttcacaattaaattggaaaacagtgacttttactgaggtttacttgaccccaccagaagtttttaacaaagccttttcaatcagctctgtatcttagaatggctttcctcactatatatttaaatttccaggtcaaaataatatattttttgcaaaactcaaataagcaaaacctatgctgcttcaaaaatgaagggcaccctgtgaaaactgtgccaaatagtttacaagtataaaaatacaacattaaagatcatttgttatgaaataattatgattagagaacattttattgtaaagtcaagcctgaaaatggaaatttttctaattttataatcctttccaaatgtagctgatagtacagatgtctacagtagaattctcttgaaactttcgagacgtggattcggttttgcagattgtccgggaacagactccaggccccgggagggcaaggccgtgcctccctcctcccatactccatggcggcacagaacttccctggactaactaggaatcagcaaatgctaaatggttgtcacgctggtgccaaatcccatggtttctgatgtgaaggaaatcggaaggaaacctgcagaatttagccaggatgatgagggtaaagggtacgtgtcgtccccartgtgggaagaacctgtttttgtttgcctgtgtgttcagtatagatcatcagtatgtggggtcagccggcttggtttctgcaggctccatggaatcttctagataccttttcaccatgagtctgaacgtttttctggaaagtgcccctttgaagtgcatttttctcataaatctgaagtgttcacagatgcagtttccaaaagcagtgtacatcctgccgttttgcccaaaatgcttcctcagatacagctcctgagagatagagctcgatcttcagagaacaatgaagtctcgaaaggtggccagagaaacctctaaacataaaacagaagcatgctgctcgttggggtacagcaagccactccccccatcagacagtagtcattagatcagacttaattaaaatcacagagaccaygcagtgagatatttggaaataaaaaaaaaattggaaagtctgagacataaaatgtggagggctgaattctgtggcttcattttggcactaggccattcctatgtttgccttgaccttggtagcttttcacacctgggtatgactcgaataactgcttcctaaggaagccacttcctgctacacacaaggaggggcgcaggaaaggaggtgggggctgcaggcttcttccagacgtgctcaccctgcactccagcagccaaggaagagggctgggccccgggaggaggatgggtgctcacacagcaccaggggaggggcggtgtgcgtggtgtctgtggagcgggtgctgcttcccttaggcttgtgttgtgtaccagtccgcctcacacatttctctgccagaaccagagaacacttccttctcgtcaaagccagggtcgctcctggggtgacccctgcatgcacagcaggtccttccgagcccctgttcctaggcaccccctgtcctcatcagtcacccaccccgtggaaagggaccctgtggaaagggacccaggacaccttccccaggcatctcattatctcccaaccctgttttacaagggggcaaagtcagcagcagataaactgagaggcgccccagcccacagggccagtggcagagctgcactgggcggtccccagctgcgctgtccccactgcagggtgttgaggggctggcccgggcttttctgtcccgtgggtctggacagctcctccaccatcttccctcgtagtgtgaggcactgtgggagatttgggaaaaggtgacatcctttcttttctcggttgatgatttcttggagatgaggagtttgcaatgaaagtgaaccggcggtaaacagcattagtccacgcatcactaggaggtgattcgtgtgaaactgaaatcaaatccttggagatgacagaggaggggctgggccaggtggtgggtggagctcttggcggctggcgggagatggaggcgtggctggggcaggtgctggagccatctgcagggtagggacagacccaagagggtgggcatttgcagggctgccaggaggaactgggctagagggaagaggtcctcccagtcaggccaagagtttagacagggagctggggtgtcgtggaaaggactcggctgcaagttgtgtgccggcccagagaggtcagctctttgagttcgtgacaaggacaaaccctgcagtctgtggcgctccaagggacggtccatggctcggtgtggctgagtgaccccaagaggatcagaagaggcacattctgcctgctttcacccccctccgtttcttccttcttatcttattcccctcttgccacacttttcatcttttaactttttctccaatggtgaaattcatggaagaaaggtgccattgcccttccattccctggggtgcgaggcccagcccctccctcccgaaggccgccttcctcatctatgaactggggcctcctcttgggccgccatgcggatgagggcagccctgtgggtgcgggtgccacgtcagctctgaagcgctgcccgagggtgacttgcccggtctgcagcgactgtcagtgcccgcggggctgggatgggtgttggattcctgcctgctcctcccgtttccagggtacccgtttccgcacacttcctcctcggcatgagctgctcccctcccttagacctgattagagaggcgggacacattttctgaactaaaactgaggacatggtgtctgcaaagcatgcacttccagagaagaaaacagaagcaaagccctgaaacctgggctgctctgcagaattcaagacacttgatggaaggtgttcggagaaggcgcccgggtgagccaacacccgggtgagcccctgtgtggtccggggccctggggggtaaggtcaggtcttggtgcaggtgcagcctcgggcatctgtgctctgaacacctcacctcccagcccaaggggcttcagggctcacatcgaggtgagggctcggcaggagggaagccctggtcaggtgggcccagctcagcgggaaccctgctgcccatggcgggaggcaggctctccgaaggacgcgagccgctgtgaaataaagtgggtgttgggaggagacacttgagggagtaaagggaagtgtaaaaaagtggattaaactgggatttcaaaagaaacagtaggcggtggggaggagattccagcaggcgggtaccaggaggtaggagtgggtgtgagcaagaggcaagtcccacccaaggggcgctgtgcttgaaggctgggtctccccactccctgcctgtagcctctgctctcccggctccccttggggccaccgtccctcgggaggagggcatcgttgttggcaaggagaagaagcctcgggtagctcctggagcctcccccacccagaactgtgcagacccccccggcaggaggagctcggcgtgggaggagacgcccggcagggccggaatctccaggtgacagcctcgtgcacacgacagggtgggactccacaggcgtgtacagaggtacctgcgcggggcctcaccttggggccgagggtcctcaggccgttgctgtaaagcagaccttcttctcagcctctgccttgatgggcacgagagagaatgcgcctctgtggtgaatggcattatctgtggtgaaatgcattagcctgtcaaaaatggcaaagcccagctcttaacacaacacgtacaccggcatamaaggaggcaagacgctgcgcggggtggtgggatgaggaatgatggctggagccgccacggcatgcaggagctgggtgttacaagaggagaaagcttcgggaaaagcaattgcacgtcaaaccgaggaggacccagcagatgaaagtcatttccaaatgtcaaacggggatcacttcgaggacgtggataaggaaggctgatctgccggccgcctccagcaggagtccccccaccctcgcctcctggggaggcctccacaggacaagtccctcgccgcctggctgtctcttctctcccaggcccaagtccccttcggcccggagctctccatggctctctgctctgtgagccccgcctcctccttccctcccctgctgtgttgggggttcattttgccatggctgacacgtgggggtccccagagctgtgattggtgttggcccgagggtcacccctaaggattggacaccttgggtctgggtgggcagacagccttggaacctcgggatagctgaacttggagctgacccagaaggcgttttctcagaaagcttatcgcttctaagggtagaatcccatattctggaacaacggggacagcagagaacttgatcttacatcagagtcggcccagtctgcctttgtgaaggactccccagtgtgaacccggaaacagacaacactgtgaccctaggggagccctgggtgccgggtggggcgggcatggggctcagagaacgcggggagccctgggtgccgcgtggggttcagagtacgtgagaacagaacgtgggagaggaagaaaaaggcaacggcagagggggcctctgtggggcgggagaggagcatggaagggcctgagctcagagagagaggggccaggacagagggggcctctgtggggcgggagaggagcatggaagggcctgagctcagagagagaggggccaggatgcacaagggaaatggaggggcttccaggggcagacagctagctactcctctcccattttttcaggtttatgtggacgtgaggtgggcagagtcaggcatttctgcaggtgtctgaacagcggcttttcctgttccatgggggctgcagaatagtgctcccttcttcatccagccagctgttctgaaactttgttgctcaaaatgtaacgtctccgtggcttttctgctttgggagaattactgatggttaagaatgaaatcttgggactggcacaggggctcacctgtaatcccagcactttgggaggccgaggcaggcagatcacctgaggtcaggartttgagaccagcctggccaacatggcgaaaccccgtctctattaaaaatacaaaaattagccaggtgtggtggcgtgcacgtgtcatcccagctactcgggaggctgaggcaggaaaattgcttgaacctgggaggcagacgttgcggtgagccgaaatcaaaacttcatctcaaaaaaaaaggatggaacctgggtatgttatttctctattagcaagtacaagagactcactagaaaggtggcaggtgtgaacaagcaccctttcaagattttttaatgtacaggataataatgcagccccagaattgagtgtctgggtctgtgctagtgtgcgcctccaggtacagtgacttgaagaacagatgggaagattcgcagacgattacattagccagtaaagctacatgttttaaaatacataattcactacagagtttgtggaatgtggatttgatatacaggtttaaacttggattgatcttatgccatttaatagctaatcaattaaaagagtttacaagtgataagtgctgggactattctcacattgatgtataactggactgagtrcctctgaggagagcggaagctggatttgccctctgggtaggcgtttcgtcgctttcagcttttttggtgaagacgatgatgcaggagagtggacaataacgcaatcttcctggaatggcctttcccgacctggaatcacctttcctggcctgtaaaacgcaccctgaaaccagagatcggatgttcctgagtgggaggaaatacaatgcagatttttttgcaaaacaaaatactaaattggatggaaactggagctggtgtgtgagtttcagaattatttctgtccccatcccagggatttcttattctctaccagattcaaggagaacaaatatacaaattgttaagtgagccccaaacgtgaagctgaaatgtgaaggggaaagtctagaaaacgtgtctgattcttctgagggtggatttccaggctccccttcctcgccccgggcatgcgtctgtcttgctcaggccttcccgttcccagtgggcccctcgcttctccagggggkgttttcagacacatcttgagatttcaaatcaaccccaagtgaggcggcagagctgacaccccacgtgcgacccgtggcccctgcaccccagtcagcggtgtcctcgggccggctgctcccagcaccctctgcaaagttcactccccaaaaaccctcacactccctccacgactcgctcacgggttttcctccagggctgctgccccacccgtccccttcttggggtacagcgtagacttttagaaactccccgtacagaccttagggctcagcacccttcggtcagagctgagacctctgagaccgggattcccagcaggcccccagaccctggccttcgggggtctggtaggaagaagctcttcagggcgtccttcaggccttgtgcagttcaggtgtcactcagatcagttttaggtagaataattgggccccagaacgacgtgcagttccgaaaatggagaagcagctgctccagtagccgctccgcccccagcccgcatgcccctgcccttcctttggcttaattaagctgtggtggccaccgaatggaaggatgtgaataccttttgtgtccctgggctgggctcctctgcttctgagcctttgtttgcccggctccctccgttgcaccgccccccctcccactttatccctgcagaccctcccatctgtccagccctgtgcagacccchgtcccctgagcttccatctcagcccggggtggcccgtcccatcccgaacaccagggccctattcatccctacctcccctttatcccttctgccgcctctgcggtgacgtctcgtcaccatccctccagtgtagggtgacttcctcattgtgttggatggaggcaggcctgggtgcagagygggccttgttgyccacaccagaccagcccgtgtggggacagccttggcttcccaaaggccaggtctgtccaatagacccacagcacccaccggggacctttacrtgytcgataagaatgaatcgatacattgaactaagatcttgatgtggtaagagcaggtctgtgggcaggggrcggggggcgggggagcatgtaaaccctcttggaaaccatcctgtgcaattctcaggtccagagtcctgcccgcccatggggagtcctccctacgcgctgcaggctgaagatgcgggtgatgacagggatggcacatgaaaatcagcccttattctgagcaaaaagaaaattaggaaggtgcaaaagtttcttgtaaaaaaaacagctgcccgytctctacttccacgtcaggcctgggctgctctgaaggcggatgacttgtttcttactgactggctattttaaattgtctgactatgaaactgaaaagcaaggttcagcctgtggggcctctcaaggctggctttgctcacagaggtcgtgttggatctgtgaactttgaaggcaccactgacttttttggaagcccttagaacttaattgcccggtgagtcatcctccgtgggagccgggaagggagggatttgtctcaccaacggcagtctggctggaggggctttgctgcggtgtgactggggtctcccatgacaacgggaagggttgcaggcatcgtgggttaaaggtgctccctctcacatctaagatgccacctttatggaagcattaaagaccatcacagaagccggtcttagacatgggctgttccagagagaagatgctcattaaaattctgtgtttccttccaatgtctttattttcacaactgtttcctgstttcaatctgaygttatcaggagcagagcaaatgaagaaaatgaatgtctttagtcttaggggagaggcagtccctaagaaaaagggaggcaggaggtcgggtttcagcacgtcggtcactctcggatgcagctgaccgcgggtcccgtgagcccgtacgtgccttctgtgcttcacgtggagcacctgcgtttcccagccacccaccaggggcttcaggagattcaaacacagccctcacctccccagagcaggaagccgcagctgtcggccggcgggggctcgatgcagctgctccagccgtgccccttgctgctcccccagggctgccttggtgtgggacactcggtccctgagcgagccgtgatctggaggccagggatgctgaccagtgtgcaggggctcagcgagggcccctctgcaccacgtagatgctgtgggtacagaaagcagacagaaggacttctgctcttgagtgtgggaggcaggggtatggacgtgaaaataactaggaaacagcacacgcctggatgcccggagcccggcckcgaggttgtgtggggactcgagaaagggctggtgctctgggcgccgcagggatgggggctgagcgagcggagaggccgcytttttcctactgatcttaggctgttccaagactgttccrcatttagaagagtgttgaaaattatttttcacttacatgaaacatgtctatatctttaatttttgttttgagaaaacatcttgcgaaatgggaagaactcactccatattgcttggccaacatcgctcatcgtgggctgactcggcttgtttgcccgtgcgtggaaccccttcctgcaggagctgtgcttacagcccctgactgggtgtcgtcgtgtgtcaggagcggggaggggcctgcagagctctgtggccctggcttgggcgctgctgtcaggggcatcctcccctgggtgtgtgtgtgtgtgcgcgtgcaaacacgtgtgtgggttgttcttggtccaagtgtaaaagttacctggacaccaaggagaagccactggaggcggtgggactgtgtcaccagagcagcgttggccacgtgggccatgagccgaggacgtccccggcttagatcacggacaggctcggctgccggggccctgactccgtggcagaagaagggaggctcccctggcattcaggggcggccgtgggccrtttgctctccagaagygagcgtggccctgtgttccctgaggtctcacagggctgccccagatgcacccagaccccggagcaccttgtagcggtgccgatcagagacctagcatggtggagtgtttgtgtaaagtcgctctcctcaacgaaatcattggttactgctcctctgctcccagctggccttgctggcctagcatgtgaggcggttccttctgagtccctctgagttttatgatgaaataaaatcaagtaaaactgtgtcatgatcggggagaggtgattatacaagaaacctttttttctttttttccccactatgacacatgaccccgtttaacaacctggaatatttttccccggccttttccctgcacacgctttctcaacatttcaccttcctgtttagatttcctgtcgtcacgtgccctgcagcctcagtgtcaaactgacagagcgcaggctttttccttaaccgttttacattcgagccacctgtggttgcaccgggccccgcggcttctgctgtgtgttgccctctgagctgaaggccagggccctccccaaacagagccggttcccgttcaccacgttctcttggtgccacgtccagtctggagagtggcctttattcctccccagcagagcccagtgaacccactttttcctgcccagctttgtacgtttaattccttagtgttgtcctgttactagtgattacactctcgaaataaccctaaaaacccaaggctctctgtgcgcacactcgggcaacacggcttcattcagttggctcccggaagcgtgcagagaggttttcctgaaacctttgttgtcctggtcttcttttggcagaattcaagaatgacaggtctcttctctgagtgatttccactctgtaattttctccatcagatgctgagttaagagatgagacatttgccttgtgatgtgtatggatgaatttctgcccccagaatcctcttcagcttattttgcacattgtgttatagagaagtataagatactttgaggactctgcggacacgcccagggccccggcctgggcacagcagaggagcaggcggctctacggcgagcgaggactgtggtgtccgaatgtgccgtgctgaccatggcctcctctgtttgtgtgctcacacctgaggagctgctcagagcacgggaagctttcagggtgggggctctgggtgcagcactgtcctgcggggatggtcccacgtgactctgcccagggcagggtgctggtgtgggcgcttgcaktgccactgggctcacactcacagttccagttggctctggatgtgttggaggcagcaccgagctgcaaaaagatcaatttttcacatttccctgatggagagtttctgcgcctgggtgcggacgcgctgggtttaccgttcctgwcaaacgctgccccgtggggagggtgttaggtcgtgaggcactagcatcacattgagttttgcggtggagcatttccatttagggcaacagtggaagacgccaccatcttctttaaaaatgcctagttactctagttttactgagagggaggaggcagggagagggtctcatcagcaggacagagtggccagagggtcatccagtgcggacagccctgggggtctggcctccttggtattgtgtcctggaaggaggccctgccagaggcccccagctcccgtgaggctgtgtggcttctctgtgcccaaatgtagatgcgggcactggcagggggatgcccacacccgtgtaagatcagtgtcccacgggccgagtgtgcaagtcaggctgtgtactcgttgcacccacctgagatcagtgtcccacgggccgagtgtgcaagccaggctgtgtactcgttgcacccaccwgagatcagtgtcccacrggcygagygtgcaagccaggctgtgtactcrttgcacmcaccagagatcagtgtcccacaggctgagcgtgcaagccaggctgtgtactcattgcacccaccagagatcagtgtcccacaggctgagygtgcaagccagggctcgtactcatcacacccacctgagatcagtgccgcatgggccaagtgtgcaagtcaggctgtgtacttgttgcacccacctgagatcagtgtcacacgggccgagtctgcaagccaggccttgtactctgtgctccacacacatccaccctcagagtcctcccaacaactctgtggagctgctctgccttcatccccatttcacagattaaaaacacacacgcagcttttggcagcctgtccagtggcacacagccccgggtgatctggacccagagtcctggtcctcagcctctgccttacacggccacaccgtgcagatctcagctctgtcttggcttgctttttttgccaataatggatttcattttctactgtggggtttttttttttyctaacacactaatggctctggaatactttcttctcaagaatagaggcacattataatcattgatattttactatggagatgacctgcaaaaccgtgccctttttccattattgcaaatgcgtccttctcactgggaatttgacatgctatccttaataattttcttaataactttctcaacacctaagaggggccagacagctaaaaagctacagagcagctatactgagacgcagggaccttcagagctttccggaaagatgtgagctccatctccagggacaggcattccaaaaatgcaaggcagcatggcacaaaaataaatgacttcccctttgtacctggaattttttttctttttttttttttaattatactttaagttctagggtacatgtgcacaacgtgcaggtttgttacatatgtatacatgtgccatgttggattgctgcacccaccaactcgtcatttacattaggtatttctcctaatgctayccctccccctggcccccagcccctgacaggctgtggtgtgtgatggtccccgccttgtgtccaagtgttctcattgttcacttcccaccgatgagtgagaacatgtggtgtttgattttctgtctttgtgatattttgctgagaatgatggtttccagcttcatccatgtccctgcaaagaacatgaactcatccttttttatggctgcatagtattccatggtgtatatgtgccacattttcttaatccagtctatcattgatggacatttgggttggwtccaagtctttactattgtgaatagtgccacaataaacatatgtgtgcatgtgtccttakggtagcatgatttatagtcctttttyttagttcacatatatattgttttttcttcgctgctaaagagtatgaattgggaagagaaaagaaaacaggtttcatccacaccctggtgggagtggccccgtgggtgccttcagggccaggcaggcccatgcccagccctcagtgggatggagcctccgtccagctcctcagagtggggagggaattcrcragtgccgccgacatcgcagctaaatctacaatcaaaagagttatgtggttacatctacctttcttcttcattcatatttaattacctgttggttattgagtcacgcaaatgccacaaggtcttactcrtccttacaaactcaaggtcgccaagctgcacacactgggccgctgtggctgaaggtgcathgtcgcggatcataaacagagccatcttcgtgattgttaggctgagtctggatcttaaatagaagattttcctttaagtgaagtggctggaaggattggaccttctgtccggccaagatctgtttgccaaaaatgtgtcagtgcccccaggccaggctgtgcaggggaggcccttgggcccctgcaagcaggcgctgtggaggggcaggtctcggggcttcctgcttggcaccactgccggttaaccccttcagcaggctcgtgtggcccacaggcctcrctctggggtgttcaccrtctgaccaggagagttttgttccgggtgaggatgcaccctttgtgtttaccgaggattataaatcagggaaatttcaaaacatgatggggctggcctccagctttctctcagaggaggctcatgttgttgattttgctttataaattatcttttgctcaaataaaatgctctcgagatcatagctctgtatttttggcgggtgtaggcggacagggtcttgctctrtcaccagggttggagtgcattggtgcaatcatagctcactgcagcctcatcctcctgggctcaagtgatcctcccacctcrgcctctcaagtagctgggagtacaggtgcacgccaccacacctagctaattatttttttsgagatggggtctcactatgttgcccaggctggtctcaaactcctgggctcaagggatcctcccacctacttcccaaagtgctgggattacaggcgtgagccaccacgcccgactaccgttctgtattttaaactcaccacacagaatggtacttagagtrttcgtagtggcgatggccatttctgtcactggctgacaggagcccccgctctgtgccctgggcccccacagaagtctgataatgaacgcaggtgatacgggcagcggctgctctcgtctgatggcagttctggtgtgatggcagctgatgctgtaaccttcaactgaggttttaaagaagtatgtgtgccacgctgtccattcagtcatcgcctcagcggtcagcaagctcacgcctccgttcagcaccgtggatgcgactgccttttcaggtgtggatgctacttttcaatgaagagtgaggagtgtggccccctcccccgctgtagccagtcactttctagtcttgggaggggaaaaacagctcccagtggcatctccagtgagcccacactggcagccttgcttagagggttagagtcacctcatgcagggtggaaatgtcccaaattataacctagagcgatttcaaatgctgtgaggtttgtctcgttggcactggctaaaccattactaagtcaagtagcgttctacatttcttattccattctagtaagaagtgtgtttttccttacaaaatttttaaatgttaaggtaaaggactgagaatggacagactatagaatttccattatgaatttggaaactataatcagcctaaaggaccagtgaatgagaccacatgagatgcccctcagtgctttctccagcaagccatgaggcagaatccaggctccttcctggcttcccccacgtctggagattcccaagagtgtccagggaagggtggagagggaggggccggtccccactgtgaggagctctggcaggtggcccagaaaggggccacacagcaaggggaagggacgctggcaggggcaggccacagtgagtgggagaggcagcggccaaacgtcccagcccccgtccttggagggagctggcccgaccccgttccccgtgagcgcagcagactggcgcatttccagctcacttgtgaggaatttctgtttctgtctccagtagatagatgtggctttcttgtgtttatcgccaagggagacaccaggagttgggcctgcagccacgtcttcccrggggcacgtgcaggacggccgacagccagtgccgctgggactccagggtttaacttgtcagtgtgatgtcatcacggtttccacgcgcacagcccttgctcrgtgacctcctcgcgggcctggtgcgctgttcgccccttgccacccctgccgtacctgcagggagtcgccgatgcccggggaacttcttcccagcctgggttatggccgggggtggagctcgggctgcagaaagtggcttcgcggccaagcagaatgtggcaaaagcaatgctttgtggatgtcctgagatacggcgtgaggcaggacactcttcagttggtcccatgacagccacactgacttagcaacagctgggttgaatgaggtgtgaacttctgactgaaccgtgctgcgtgaacgtggctgagccgtgaggttaggtgggcggtggatgcaaggccttcccttcagaccctgcatgcacaagaagcacacggtcggcaatgttacttcaagcttgtagacatcgggtacatcccatgtccaaaaagaaggctcgccctggaaaagcacattccgaaagcagtcgcggcrtggatgcagagcgctgtgcccgcagcactgcccacccaggaggctgtagggagtggcggccccttctctctcctcctcctccttcctcgccccgtggaagctcttacgcacctccaggccccatgcctgctcacacctccccatctctgcaggtgccattgcrgcctagccttggggcctgagcctctcctgcctaaagctttctttgacctcaagttcagggagggtcccctcctcccggccccamggcaccccttcccacgaacgcccaacacgtgctgttgctgtcattcccatcgcttcttgcggtcactcgtgcccagctctgggtggcgtgggagtgctcgggggtcagggcccggcgagtctgacccagcctggctcagcctggtgttcctggcaccctgtgcagtgctgactcggcaagggaccatagcaaacctgattttgaataaactaataatcatcgtagtaggaacagcaaataatcacctggtgtgtgtcaggcacaggcccaaagcctcactctaagcatgttatcttatttaatcctcccagcggtgaagtcggtaccattatcaccacttcacagatggggaaactgaggcacacagagattagtgttttcccaaggccacacagtcagtaagacctgaagcccagattcaaaatcaggccctctgactgcaggtgctatgagtgaatgagtcaatgactgccctggacgtcaaggaaaagaaccaaagttaggtctgtttttgcagttctcatcctgctcctctgaagwcatacctgttttctgggtcctggtttctaggaggcgtccatggtggccccgttgcctctgtctcagggcagctttgtggaggtgcagagactctcctaagtggcaggttcccccagagccttcagaaaagcctgcgctggtgatgtgagggaaacatggctggtgcctccggggagccacgtcctgcccatcgtagtgtccagggaagtaggacrcgtctctcacctgcccccaggctcaggggcagcatggggggcttcagccccagacacctcctccacccaggacccggcttccccaccatcccgttcctccctgcaggccattcctggccttatcactgccaacctcctccrcccaggacccggcttccccatcatcccattcctccctgcaggccattccyggccttatygctgctcagatgtttgcctgagccacttgctgaatagaaacttggtagcggtgggttcagagcggagcagcgccgggctagagcacccgcccccgttcccaggcggaagcccgcagggagagcgccttcgggcaagagcagcgtccccggccgcgcgttgccttgctgtgggcacacccttctcccacggcagcgtctccctctgcacaggcgaagagctgccgccacgggtctccagcattctgcgccaagctttcgggggcttcctctctgccagggacatttttcttggatctttatcgcagtttccctcctttgaaaaagttaagaccttcaagaagaccctgcgctgcgcagtgacgcgagaccactggtgagagccgcgggtccccgctgagcggcaccgaaccctgggtctccctcaccgtgcaccagcactgagccactgggcactgagccacccgccggaggaggcgatgtcggcttgtccagctctaaattctgcgactttggcccggtgcagtggctcacgcctgtaatcccaacactttgcgaggccaaggcgggtggatcacctaaggtcaggagttcaagatcagcctggccaacgtggtgaagcccgtctctactaaaaatacaaaaattagctgggtgtggtggtgcaygcctataattccagctactcgggaggctgaggcagcagaatcgcttgaacccgggaggcggaggctgcagtgagctgagattacaccactgcactccagcctgggcgacagagcgagactctgtctcataataatagtaataataaattctgtaacttcttcagaaatatctttacatttgccaagccgtcaagagtttggctctggcttagagaacggccctaacttctattcactaatacgtctctcttactcatgaatgcttgaggctttctctgtagctgcctccatgctaagcactgaatatacaggaaaccatctattttaatcttcacagtaactataggattatctccatttataaagtgaaaaaataggcttagagacctttagaggttttcccaagttcacatgaaaagtttgtggttgtttgctattggtgactttgggagaaaaataaatacaataaaaacggaagtttgtggtgcagcagggacctcagtcctgtggggcctcttggtggcttcaccctccatggcactcaggaaataacagagctcagacctcactgtagctctcccatgggtrgcaartcacaggatgggcatggaactagcttgattttttatttttatgtgagtaaatctccagcgtttcaaatcctcttccccagagggtcacattctcggaccctctgggttccctgagctgtagctgttctcatgctttggttggacrttatttttctggagaaattgtgtgaagagatagaagttacttcagaaacatttctcagtgtgcttttcccccacgtcaagcaaaattcatgtgcacaattgagaaataaatgagatgtatactcaggttggttactggtatcatctaccttattaaaatcatccctcattgggtggatcacctcaggtcaggagttcgagaccagcctggccaatatggtgaaaccctgtctctactaaaaatagaaaaattagccgggcgtggtggcaggcgcctgtaatcccagctaatcaggggagtgaggcaggagaatcgtttgaacccaggaggtggaggctgcagtgagccgagatcgtgcctctccactccagcctgggagacagagtgaggctccatatcaaaaataaaaataaaaataaaaaataaagaattatcctttgtggggttttttttgtttgtttattttgctttgtttttgagattctgagaaaacgtgggtggatttttttaaacacactcactattttaaaactgtctataaactaacaagtacctgaagatgtatgggaaagaaggaactggaactctcccttttcttagagaccccttaccctcaccagaggcccttggtaaagtccaccttcccctgtgcgtctctgcccggtccccatagtcatcccccccgccccccccatccctgtgaccatcctcccacccctgtccctgcggctatccacctcccgcccagtccccccagccatcccccccatccccgcggccgtcccccccttccccacagtcgtccccccccatccccgcagtcgtccccccccagtccccggggtcatccccccccgtccccgcagtcatcctcccagtccccgcggtcatcctccttgtccccagctgctctcacaggggctgcaggctcctggagagtgggggccgcagggccccttcccacagcacctgtatctcgctatgagtccgaagcagagagcccgggagcatgaattgctcatcccagagagccaggtggagggaaatgttttctagatggtgtggtgccggtgggcttggcagacatctttaaagccaaggaagccggcagcccggggtgaagggagaatggacacaaggaagccggcaccccggggtgaagggagaagggacacatggagtgtttcctgagctttggcgattgccttggggagtgcaaggcctttgacgcacacggctgtggggagcgagtgggtggcttggcctcccccggacaccaccaaaatgaaaccaaggcagcagcagcccacgaggttccccggagcctttctttttctcacgaatgcattttcacctcttctgttgagctccagttctcttataaactttttctgggtatcatttcaytttgcagactcagggtacaggtatattttcatcaggcaataggacgggctatcctaacacagtggttagaacactttcaaaacgagattgttggtcagacgtcaggggggcacccaggctgcaccctgaaggtgagcggcagcagcggggtcccggcgtgttctgagcacctgaggctgcgtggccgtgtcctgcctgcaggcgggtcccatacggccgggcaggtgctcgggatgcccaccgcgtgtgtggttgagctttgcctggggaaggagggtcgaagaccctgcagtgatccctcagaagctgtcttggggtgtaatgttgagagtttcctttaaatacgggaacttctgctttggtgtctactcagcagcacaggcctttctccctcccctgtgccttctgtctcccgcacggctccatttgccttctcttgcatgggctcttggacattgctttggaaagagaaagaaacgtcagaatgaggttcttcttttttctgcaractctttgattgtggtaccagtttctgtatctcagtccacagtgcaaaccgcccccggcctcccctgtggcttatattctgatagaatgagaagccacccaacgaaggctactgtggcgttatcccagaatattccacgttgatgacagaggaggatccagtggatgctttcttgaatctataggagtgwgtgtttgtggcgtgtgcagtgtgtgtgtgtctgtgatgtgtgtatgtgtgtgtggtgtgtgtgtctgtgacgtgtgtgtggtgtgtgtgtgtctgttacatatgtgtgtggtgtgtgtgtgtggtgtgtctgcgatgtgtgtggtgtgtgtgtgtctgtgatgtgtgtggtgtgtgtgtgtggtgtgtgtgtatatgtgtgatgtgtgtggtgtgtgtggtgtatgtgtgtgtatatgtgtgatgtgtgtggtgtgtgtggcgtttgtgtgtgtatatgtgtgatgtgtgtggtgtgtgtggtgtatgtgtgtgtatatgtgtgatgtgtgtggtgtgtgtgtggggtgtatgtgtgtgtatatgtgtgatgtgtgtggtgtgtgtgtggggtgtatgtgtgtgtatatgtgtgatgtgtgtggtgtgtgtgtgtatatgtgtgatgtgtgtggtgtgtgtgtggtgtatgtgtgtgtatatgtgtgatgtgtgtggtgtgtgtgtggtgtgtgtgtatatgtgtgatgtgtgtggtttgtgtggtgtatgtgtgtgtatatgtgatgtgtgtggtgtgtgtggtgtatgtgtgtgtatatgtgtgatgtgtgtggtgtgtgtgtgtggcgtatgtgtgtgtatatgtgtgatgtgtgtggtgtgtgtgtggcgtttgtgtgtgtatatgtgtgatgtgtgtggtgtgtgtggtgtatgtgtgtgtatatgtgtgatgtgtgtggtgtgtgtgtgtatatgtgtgatgtgtgtggtgtgtgtgtggtgtatgtgtgtgtatatgtgtgatgtgtgtggtgtgtgtgtgtggcgtatgtgtgtgtatatgtgtgatgtgtgtggtgtgtgtgtggcatatgtgtgtgtatatgtgatgtgtgtggtgtgtgtgtgtggcgtatgtgtgtgtatatgtgtgatgtgtgtggtgtgtgtgtgtggcgtatgtgtgtgtatatgtgtgacgtgtgtggtgtgtgtggtgtatgtgtgtgtatatgtgtgatgtgtgtggtgtgtgtgtggcgtatgtgtgtgtatatgtgtgatgtgtgtggtgtgtgtggtgtatgtgtgtgtatatgtgtgatgtgtgtggtgtgtgtgtgtggcgtgtgtgtgtgtatatgtgtgatgtgtgtggtgtgtgtggtgtatgtgtgtatatatgtgtgatgtgtgtgtgtgtgtggtgtgtgtgtgtatatgtgtgtgtgtatgtgtgtttgtattctcagattctgagagcaaggcctctcttttcctgcacaagcctgaagtcttctcgggtcaccgtgctgggcgcgtgctttggggtgcgttgaccgtcatgttgcgctggcctgccctggggtaaactctcgcctgcctgaaccttggatcttagcaggagaaggggttgtgccacgtgggtgccgtggccctcgtcctgctgggtgtccccaatgccactaaccccctgctcttcctccccctgtcctgcaggagctgtgccgccagcgtatggccacgcggccaccagaccgacctgagggcccgcacacgtcacgcatcagcagcgtctcatcccagttcagcgacgggccgatccccagcccctccgcacgcagcagcgcctcatcctggtccgaggagcctgtgcagtccaacatggacatctccaccggccacatgatcctggtaagcccagtctttgcactccctgccacacaaacaccagggccctccttcctcggcccctgcaacacccagcatctgcgcccgctgaccctcggggactgggcgatgatggctgcaccctgcccgctgcagaggctgacaggcagggctctttctgcagggagtcttcttaatttagataaacaagaatatttacttcctgagatctttgccgtgcttctgcctggaacgtgcagcccccacacacagtccctggtgtgtaagagtgagcacccgctatttagttttcagtggaatacacgtctgttagtgcctaccatgtgcgctgccgttttgggcctctgactcggaagcagctgctgtctccttggcactcaaggccagcaagcgtcatttgggtaaataaatgtcactgctgtgacagcaaggcaggaggaggtgtgggctgggtgctcggctcttcacaggagccttcctggtggcgccrgccagaggctcacggcgacgcggcttcagcggccttttccagggtcctcgctggagtgatcacgcgtgtgtggccgtgcattgccactccatacataatgaatgtccgggtgttattaggacagctgtcaatagcgcagcacgtcctgctggctgcctcctggatctccaggccgtaggcgtcgtcctggtgggtgaccgtgcctggctgtgctgtttcccgcactggagacggagcctctggggtgaaagggcagagcctgttacgctgcttggccgaagcagcggctgcacttacgggtcagggaaacattcttcgccgtacca[450 bp omitted]acccgggagcagrcagctcgtggagttcactcggcagacctgtcatcgactttggcagaacctcctcccttgatggactgtggttttgttactttagatctgacttttctgaggctgttttgacatttgtcccttttagaaaaggagcagagaccaggagttcatatttgtgatgagatttggtattagggccaaacccatcagccaaagacattcatctgacaggtcagccaagaggagagccgcttagcgagctctcattgtgttctgatatttccacatttcaaggtgcttgagtaacaatttgatgatatctcaagctctattggtacctggaaatactgtatttctcagagaattgtgtttggcattcacatatgtaatggcagctctgacagcaagcaccacttctgctggaakgcctaaaccgcaaggacagactcagcctccacctggcggaaaccctgcaaagcctgactccagacaccctgttggggggtcatcgagggccacacaccgtgacggggtcctgtttcggaacgcgtctcaccaccgcccacaactgcagggccgaaacgagaaacacactcaggccaagtatgagtccggctgacttagactctgtgcgtacagattgtaaactcagggaaactggatcttcctcatcaaccaatgctgttttgaaaatgaatgttactgagatatttccctgactccacgatgccagcaggtgctggtgggagtcagggtgggtgtggggagcggcgggcacagtgtggagttggggagggtgtggggagcggcgggcatggtgtggaattggggtgggtgtggggagwggtgggcatcgtgcggagtcggggtgggagtgggaagcggcaggcgtcgtgtggagttggggtgggtgtggggagaggtgggcatcgtgcggagtcggggtgggtgtggggagtggcgggcagtgtggagttggggtgggtgtggggagcggcgggcatggtgtggagtcggggtgggtgtggggagcggcgggcatcgtgtggagttggggtgggtgtggggagaggcgggcgtcgtgtggagtcggggtgggtgtggggagcggcgggcatggtgtggagtcggggtgggtgtggggagcagcgggcatcgtgtgcagttggggtgggtgtggggagagacgggcgtcatgtggagttggggtgggtgtggggatcagcgggcatcgtgtggagycggggtgggtgtggggagtggcgggcgtcgtgtgcagttggggtgggtgtggggagcagcgggcatcgtgtggagtccagcaaccaagtgggccagrcgtgggccttggaccctggcgtctcctctcactcagcagttctgattttccttcctctgagctcactttacaagtgcattcccgtgccctctcagccatgcggggtctcctggtgggcatgtccctggtacaggagcagagaggcacagactcacgccacaggtgagctccaggtagacctcttcccaggactcacacaggtagccttttaggctcggaagctacagccaatctcggggcactgaccgccaccctccctggcacacacaggctgtagaaarcacatgcaggttggtgccgcaggaacgcatcagagtcrccgaccttccgactcatcacagctacaaggcagccaattccgtggtgatccagcagcccagccctctgtgcgcaaagcctcgtttccgccagacacccaaccggccacctcastgcccctcacctgaggatggcaggayggtcagataagccacagagattcccagcgacatgttcctgacatgcagccactcctggggcacgttggacaaaacgtggcatctgaaccccacgatccgatgaaataaacagcagaggttggtgatgtctggaggccaagctagatgtgaggagccccagcaggtgggagaggccggctgcaccgtctggggggcaggctcagcaccaagagcggagactttctgtgacaaaggacacatgtggsagggtggaggctgcacactgccccggagcccagaccttcaggcggggctggcctggctgtggccccacaggaagggcctcctggccccgagagccccctcccgccytgggrcactctacccactggagctcacgctgctgctttctgcacagaggctgggattccgtgctggagacccggagtaacagaactctagaaatgagcactccatctagagaggggagcatacaacactcttataaaggagacaggccagggtgtgagagaaggaggcttccctgggagacaggaggcggcaggtgcctgccccgatggggggatccatggggctgtgcagccactgggtgtcaccaggaagaggctggtgtctcaggactgcagggagggacttagttacctggtcaaggtgtcccagcaggtggaacaagagggagagcacacgtctcagggacccccggggaaggggccacatgaaagcctgatgggaaggggcaggggtgggcaggtcattggggcagccgctgggtcccccgctctgccatgacagcaggtggtcaggtctagatgtggagcacagattctgggctccatcagcaaggtgtcagagctgagacgctttgctgttgcaggtgctgtgtcccaggacagacctccaaccttcttctcccctgtgagacgggcttgatggcagtgcctttcccctggggttcctgtgagggtaaaaccgggtgagcatctgagatgccgcccatcctgagrcctcacctgtgccgmaggtgcgtcgggctggagaggaaggggttgtgctgaaggaacagagcccggcggggcctttgcttggtagggtttgggcctctgggcctgcattctctacactctgcctgatccctgtctctgggctttgattctggtttttgtgttgctttgccttcattttcttagaaaggtcctttaaaaattccagttttcttctgggatgaactaaggagaaagggctttatttgcagggaaaacccagcccagaatgtcacttgttcctggaaaatgggcctcccaggcgcagggaaggtgcagtcygtgcccctgccttggactgtctggaagaagctgagtcgaggctcacctgcgggtgaatggagcactcagaggagggagaggcaggaaggaaacacttccatcaagaaaccggtacatttctctggaaacggccgaaaggcaacacggagatgctcactcagagcaaggctcgggactctgaaaagcaaggacgtgatgaaggcgacttcgcaggacggttatcaaagyggctgcgtgttaatcatctgcggggacgtggcttctcaagaaatcctgtcacatccttttgtaagataaagaatcatcgagttttttcaagatctgtttccctatcactttgctttcagaagggtgacatttctgcctggctggctctgagtgaggaggtggagaagagtgtcaccgtcccgatgtgactaattacgcctgagtcggccgggagccaccgcgtccacctttaaaggctagagaacgttttttggagagtggggatgttaagaaaaaagttggcttcatacttctccattcgacttaaataatatagaacttaacttgggaaagccgtgctgagtaagtgcttttcagaatccatcctcttgagtgttgaagatgaggatatggacagtgatctttgagttcgctcatccttggagagtcctgaggcactgagggcacaggagctgtgagtaggcccatttcacagatgacgacattaaaaccaagcgcagtgacagagacgtgaaaaacgaaaagttaggcattgcaggaagtgaccaaagatttcccatgatcacagaaaacaggaaagttcatgaattttgctgaggagggagggggtgctgccagcctgtggagtcgcgccgcaccttccgcagatttgcctgtggggtttctgaactcccagcgtgagacgcgtgatgcgtgtctgtgctggcgaccaacagatgccggcacaagctgtgacctcctcagacccacacggctcacggcctctgaacttcggccctcctgcctgcctggagtcttccctgggcccgtcgtgtctctgcctgtgcaccttgagagatctctgtctctcattgtttgatcttgtcaggctccaggcttcttagttcttagcgataagtcaccgaaccaggagggcctcgcgaaaccatgccagatgtccctgcccaaggctgcaagtcaccagctgcagcagaaaggggctggggtcccctgcaccccacgccaccagtgccggggccttggcaggcgctcccctggccccagtccctccaccttcagacccagtgccctgtatttctggaagattccattccatcgttcccacgtggttgacgggcacagatggctgctctcccaggatgaggggcactgggccaccgagaatttcactctggggccacgcggctgggctggccgttctcgctctggctcgggtgctggcgcggaggcctgatgagtaaaccaggccgcagggcgaactctccagctttgtggggcctgcgttcacagacacggcaggccgttgctgctgtctggacgatgccggctttgtggcgcacatttggaggagcctatttttgcaggaaagctgtttctcaccattgaggactgcgtggcataggcaaggcctgcacatggaggggtacatagtccccccttcccagcacggcgggtgggggtgtgccctgccctgatggggagcccctgcgggggatgtctctctccggcgggcaggtttgggaagccttcacgccacacaggaccaggcacggagccccatgaccagagacggcattaaaccagcagggaaggggaaagctggggcaagaggcagagccaggagaggaggagcgtccaggtgccatagtagccggctctggagaccccgagacttcccagcctcactcctgcgggcctggggagctcctttgagagccatttacgcgtccaccgagttcagtgcacagtgaatgggtccgacccaccgagttcagtgcacgctggatgggtccaacccaccgagttcagtgcacactggatgggtccgacccaccgagttcagtgcacgctggatgggtccgacccaccgagttcagtgcaccctgggtgggtccaacccaccgagttcagtgcacagtgaatgggtccgacccaccgagttcagtgcacgctggatgggtccgacccaccaagttcagtgcacactggatgggtctgacccaccgagttcagtgcacagtgaatgggtccgacccaccgagttcagtgcacagtgaatgggtccgacccaccgagttcagtgcacgctggatgggtccgacccaccgagttcagtgcacagtgaatggatcggacccaccgagttcagtgcacagtgaatgggtccgacccaccgagttcagtgcacgctggatgggtccgacccaccgagttcagtgcacagtgaatgggtccgacccaccgagttcagtgcacagtggatgggtccgacccaccgagttcagtgcacgctagatgggtctgacccaccgagttcagtgcacagtgaaagggtctgacccaccgagttcagtgcacgctggatgggtccgacccaccgagttcagtgcacgctggatgggtcygacccacygagttcagtgcacagtgaatgggtccgacccaccragttcagtgcacgctggatgggtccgacccaccgagttcagtgcacagtgaatgggtccaacccaccgagttcagtgcacgctggatgggtcygacccaccgagttcagtgcacagcgaatgggtccgacccaccgagttcagtgcacgctggatgggtccgacccaccgagttcagtgcacagtgaatgggtccgacccaccgagttcagtgcacagtgaatgggtccgacccaccgagttcagtgcacgctggatgggtccaacccaccgagttcagtgcacagtgaatggatccgacccaccgagttcagtgcacagtggatgggtccgacccaccgagttcagtgcacactggatgggtctgacccaccaagttcagtgcacagtgaaagggtccmacccaccgagttcagtgcacgctggatgggtccgacccaccgagttcagtgcacgctggatgggtccgacycaccgagttcagtgcacgctggatgggtctgacccaccgagttcagtgcacagtgaatgggtccgacccaccgagttcagtgcacactggatgggtccgacccaccgagttcagtgcacagtgaatgggtctgacccaccgagttcagtgcacagtgaaagggtctgacccaccgagttcagtgcaygctggatgggtccaacccaccgagttcagtgcacgctggatgggtcygacccaccgagttcagtgcacactggatgggtctgacccaccgagttcrgtgcacagtgaatgggtccgacccacygagttcggtgcacgctggatgggtctgacctcccagtggctgccatggcctttgggcccggtgcagacccaagtatccgtcctcacaccctaacttgcttgaggggacgttctagagcctcccgtgtccatgcagccacccaagccacagctcctgcttgacgctcctgggactctgttctgtacctgagactctcacagggcccggtaccagtgggacccagcctcccctgtgcaagggcctcccctgggtgggaggacatgggctgttaattagacccgggttcattagacaggtgtgttaggctgttgtcacactgctatacagaaatacctgaggctgggtaattcataaagaaaagaggttgaattggctcagggttctgtaggctgtacaggaagcatggtggcctctgctcctggggaggcctcaggaagtatccagtcatggcggaaggcaaaggggagccaagacstcacatggcaggtgcaggagggagagaacagatggggagtgccgcacacttttaacaacaccatctcaggaaagcctgctcactatcctgaggacagcgccaaggggatggtctaaaccacccatgagaaaccaccctgtgacccagccacttcccaccaggccccacctccagccctgggsstacatttcaacatgagactggccaggacacagatccaaaccacatcacaaggccatgcggaggcagcgcctactgtgtgcctggcaaacagttggcattcagtcagtgatcagcaggatccctggttctgctactttggggttttggggtacaggctccactctcttccctgaaaggaggcccttcatctgctaatctctaaactgaaagattttagcccttacgtcttgcacctttttcaaaagcagctttacagtgacctaagctctaaactcgtggttttctttgtcatattgtaccaaggggtgggactgtgtcccagcaagcaagtcccgggctggtttggtctgggacgtgcttcatgaagacattacagccactcggcatcattgtggggaaggtaaccacggcaggggtgcccacccacaccgggactctggggcccagccccctccccagggccagccggtgctgctgtggtcatgtggtgcgtaaacagcagctcctcacatgacgccgctctcaggagagggccctgcatgagtgtgtacagcccggccccaccctcctaacagccatatgttctcctgttattggacgcacagaaatttactgtctcctagtaagggcaatgtaggcaatttcaaacttttgccactccagactacacggaccatgtgaaatgtgagtttttagaagccagatcctgagtcatcgcggatgcttattgtttattttgatagatactgccacattccctgcmataatctttgccaagatggcgtccccctagtgccatagacatggtacctctgtcccaggtctcccagcctcaggtatcagcgaacctttgarctttgccgctggtaggtgggaagggctgcatccaagtggttttcacttctgtttctctggcttgcgtgagactgagcatactttctcatgtttgggagccgtttatggttccttccaagagtggttttggacacagtcctcatggcagcaaggccagcagcctcgaaagcctgccaagtgcaagtgtggcacgtccacgcaacaycaatcacaggtgctgtcacggaaatggacgtggcagtgaaactgttctgctcctgttcgtctcctccgtgtccgtcatcacagccacagtcacctctgagagaggcagtgatatcgattaattagggcaaagtttaggaagaccaaggagaaagagaaagccctctgagagttcttgtcctgtccagatgtatgtgaccaggtgagaaaggagccggctgggtagctcgggcccgtgtggttcccacrggtggaaatcgtgcataggattgtagctcagagcagacagtgctgctgcttttgttttgttttcttttgttttttgktttttttttttttgttttttgagatggagtttcactcttgttgcccaggctggagtgcaatggtgtgatctcggctcactgcaacctctgcctctcgggttcaagtgattctcctgcctcagccttccgagtaactggaattataggcgttagccaccacgcctggctaattttgtatttttagtagagtcggggtttctccatgttggtcaggctgatctcaaactcctgacctcgtgatccrcctgcctcagcctcccaaagtgctgggattacaggcatgagccaccgcrcccagccagagtgctgctttaattgatgaagcaagaatggggctcctgggagaggcgtatgctggctatgtgaggtctgtggacctccaggggcctgccctggcctgctggggctgccgtgacgacatccctcaggctgggcagctgaaaccacagcagtgtcttcctcacagtttcggaggccagaagtctacaatgcaggcagggcttgttcctcctgaggtctctctccgtggctggcagatgacatctttttcctgtgtcctcccagaacctttcgtctgtgggagcacatcctgctctgtcttctcaggacctcactcagattggtctggggccaaccccagtggcctcattttaactccatcatctctgtaaaggccccacctgcaaatgaggttatgtgcrgggtaacctggaggggattagggaggcagcacatggattctagggaatggttcagcccgtaacagggaccgacgcctgatgcacaccagtgttttctggtagcttgtagcgcatgagaggcccctggtcttccagccacagtcccacgggggaagctccagtctccccgcactggtgagctgagcgtgcggcgagcactatgargctggccggtgtctgggccctgggctgtcacctgccacagcccggactgccgtctatctgctgcacgagttggtgacgaaccttcgaggcctgacggagaggctggtgagccactttagacaccaccactttctagagctcagctcacacttcctggctggagcctggccgcctgctcccacctcctttactgtgggtgcgggtgtctgcagggggtccttgggaagggcgcagacagaggctggaggcagcagcggctgtgcaaggaacaggggctccgtcgggggagcagtcacagccactggttctggatttccctgggatgcccgggccgtgggtgtgcccgtcctgcagcagctgtgccttggtcagcggccatcacggccttcccctgcagcccccacacctccgccacagtgccccttgcagcgctctgtggatagttgggttgtgacacaggcagagagtgtcccttccatgatccgcctttattgagggtgtggaactctatttttttgtgggagggggagtgatttgactttttattttttaaaaatctgatttgctgcttaaaatgctagagccatgctagtgctttatttttcagtctctccaagttttcaatatgttgtcttttctgccttgagcacttaatgtttaaaggaaaaattctctgaccccaatctgaccagtccctgctgccatgctggccccagcgagacaagtggctgagtctataggaagagtttgtaccatctttagtatgacagatggtgggttatgtcccaacaaacccatcgtaagttgaaagtgcatttttgacttaatgatattttcaactccaaagaggtttatcctgccatagccccatcataagcggggactacctgtatatttacgacctggtttgattggatgtttgggctccagagaaggtgggtgatggtccagagagtctgcgggagaaagaggtaagctgctgtgatgcagcttggcctttgsstgccggggcgattggcttaggtaaatggcacccactgtcccgcagccctgcgttttagctgyttttttttttttttttttttttttttttttgctgtttcttgacttggtagacccttcttatagtgtgtgaatggggcatgatagaagaagtggaatcaagcatccaactcatacttgttgaattaaattgggtaaccaaacattaaacttggtaaaagttaacaggtccacgaattaacggttgtgrgaggaaacacttgaagctggtgcataaagtcaggtctggaaagtgctcattcgtgcagcgttttctgagcacccagtgacggacggagacgtccacaggctgctcgggaactcatggaaacttcctggagaaacccgaggcgaggaggcgagaccagaggccgcctccatctggtctgtccagtgactcctgcatctgcaggtttatagacagcatcagaggaattgaatcacagcagttcagggcctggatggagttatctgattctttgtgtaaatgtgtaaacctaacacgagtttaataaaatgcagcttttgaaattccacaagcagttcagaaatgagctggcgtcaggtgggctctgcttaccttcatgtcctcagcacggctcctgggcagaggaccatggggatgctgggtgtgaaggaggccagcagtctggctcctaagaggcttacagccaatttggggcaaaagggggtgaagggctggagaaacactagacattgccacacaccaagctgcattcttttgctagaagacgtctctgtccttgacgggagtgtcgggcgtggcaggggggctacagaggagacttgaggtggacatttgagaccaggttttggtcggtgaagacagctgtgttgggcaggtggcatgcagaggagggaacagcacagctccatcaggaagcagagggcagttcacagaattggagttcacggtggaaggagcagaagatgagctcagcctggactcgagtgaacaccttgagccagacgtcaggtagctttgtgcgtccacatgtggagtggtgcttgactccacatgtaattgttgtgacttcttgaacccgaaaagtcgacattattcacttatttgtgtacgtttgcagaaggtgggagcacttaggatgcatgagccagggactgagtgggtcctgacttgtcactagtgttttctcttctggagcaagaggacagtgatcttggaaagacaggaagatttggtgctgcagtgaaaagatggtgccacgtccagagtctggcttcccagtgtgacatctgggccagcattacatcctgtgaactctggcttccccttccacaaaatatggctggttacaaaactcatgcaaccatactgccgtaaagaaaaataatgacgcccactgtgggaaaatctcctaacatactgcagagtattgcagtgacgtttctaaaattatagaaaccatgttgccaagtaagtttttctttaaaaaagctaatctctcactcactcagtgtttggcctgtgtacatctcattctttgccttacatatgccctgcattttctgagttgtattttgttgcagcatcctctcctgccttctgtgggaatgaatgggttttctttattccctctctcccccttggctagttcagcagttatactttagtaattatcctgatacttttaataaccatgcttggcttaacaatatctggagttcacatttctgccctcctcacaaataaacccaggacctgagacacagacctcagctacctccctctgacacatacagtattgttcagtatttcagttgtgccttgtctttgtatcctgaaatcaaccgtttgttttactagctttcatagtcagcatttgttcagaccgactctcattttatgaggttcccctctccccccatcaccattccttttactgctcaattcttcattttgggtaaaactaccttttttctgaaagatatccttctttcagtcttttattgggaaagtttccttctctttgtctgaaaatgtctttgatcctcacacttgcataacagattagccaagggtcaagttctatttctttttcttttattaccttgaaaccctgttctcttgtctctggtgcccctgcacttgagaagactgtctgttgctggtcggatggtggttcctttgtgtgccagctctagctccttcctgatcgctatgtctgatggtggttcctttgtgggccgctccttcctgattaacctttactgttttggagtttccttgtgtcctgtcttggtaaggrcttattttatttttaatttttgctccaaacttactgtgattcctgaatctgagaattcctttctccagctaatcctaaaaaattataaaccatatataatttacatttgactctcttccattctcccctctaatggaaataagttgtaccttcttattcccatgtcccttaaatccctttcctattttctctatctttctgtcctgcattccagggaatttcctcagatctgtcttccaacatacagtgtttctcttcagcagtgtctaacctgtaatccatgcattgtagttataatgttaaagagtatggttttcacttgaagttctattttgttctttttcagatcaacctgctgggttgttcttttcttaaattgttggttcctactttaacaccttcaatcatgatcaatgcattatccgatggtttctaacacgtttattaaggtctcatgggtctaagcctgctctttgatgtttgctgatttgctcatggtagtttgttgtctggtgggttctataattccagattataagctcctcattggtggggctttagttctagttttgtatggccctgttctgagagtattaacctcaagagagcttttgccagacacactaggctgtcattaaactgagactatcttcatgtcaattcctcacccagatcactcatgtgtttgagcctcaattctggatgaggcccatgtttcaagcgtcttcccattttgagtcyatatggtgacagacgagattcctgtggtgtgagcacacccatttgctaagggtgtggttgttgagggtcctgtgttatgtggggggctcgggtccagctctctacctccagcaaggcagggttttccctgctggccccacatgggcagcaaagtccaagaccctgattttagatgtagggaatcctgtcgcctgccttccacccagggcttgagcrgcttcaggccgcacatcccccattccagtttcactttctccttcagcttggattcctggggatttcccttaattctgtgaaaggctgactgtgccatttgtccagmattctacgtgtctgtggaggaagacacttcaggttatctccttcttcatatcactggaaacacacatgccatgcaaattacacaaaggaaaacagtgcagaggccgcactgtgcttcatctcacatcacattgacaattgcctccaagaaccaactgtgtgttctccctaataaagaaagatagctgggcacagtggcttacacctgtaaccccaacactttgggaggccaaggcgggcagatcacttgaggtcaggagttcaagaccagcctggccaacaggcgaaaccccatctctaccagaaatacaaaacttagctagatttggtggcgcatgcctataatcccagctactcaggaggctgaggcaggagaatcacttgaacccaggaggcagagrttgcagtgagccgagatcacaccactgcactccagcatgggccacagagcaagactctgtcaaaaaaaaaaaaagaaagaaagaaggaaagaaagacatcctaccgatggctgtctagagtcaaagatgagcaggtaatgatcacattccgccgggtttccacactcacctttctgtaagcagtcaaagggatcgctgtgtccagaatgctctgcctctgggagtgctgatgggccaaggtctgcagcaggtgagcagcgagtgggccctgacggctaatgctgatggccttagggaagtccaggtggtccacgtggctgagtgacgacaaggcagctgcagggagggacagatgagaagtcccagcaagaagagtgaccccgatcatccactcccacctcaccctccaaaccctgggaatgccagcgggcatgtcatttggtccccatgccrtgtgactggcactgagctgggaaaagatgtaaaatatctctgatagtctcacctctaactcttcaccctgaaaagtgaaaacactgtttgacatatcagctctctgttctcttctcctccaaactcctcgtttcaaagcaattggaagaggagtggtgaccagtcaacacttggtaattgtggttgactatggaagcctgaatrttctcttcccttcaccaacattttagaaatttcactgctcacaggaaggtctggaaggtggaggaggtagactgagccctccaggctcagttccttgtgagcacgtttggttggtgaagagctggatattaactttgtctcgcacatagactgacccctccaagctccgttccttgtgagcacgtttggttggtgaagagctggacaataactttgtctcgcacatagactgaccccttcaagatccattccttgtgatcacgtttggttggtgaagagctggatattaactttgtctcagacaagcaagtctttctggtatttttggtgccatcaccttgtcagttgttttgttccccttttcttgtattattgctcatgtgcatatagcctgtgggttttaggaagtgaagcatcaaaacattctactttcagtgagcacctttagaacttcggcattttcaaataaggtgctatagaattcagtgtttctcctctgcttatggaagaagacatgcatgtctccatcactgtcctaagtaacctttacagcacttgctggaactctttattcttcctaaaaacttcatcagaaaatcgtaatgagtacatcgttggcacagaatagagaatgctgctgctaagaaaagacctgctacttgggagcgggagaagctgtctatgcgttgcctggcaaccgcccctcctcatccttcttctgaaaggtctccctgttagaaccactgtcgtcatcagtggagtaaaaatggtcccctctgggctgcttctcctgggtcgggtgccagcaaaggagtctggtctctgagagaatctgatcataccgttttggccatatgggctttgtaggtgaccatcagggtggggagaggtgggtgcatgaccacttaaacaaatgggtctgctgccacacaaagcatagaaatcgtgatacgaaacggcttttgaagggatcttacggaaaccgccactccccaggctgctggaggctggtgtggatgttgctgctgagccaccccgattcccccacccagggctgcttgtcacagagctgggatgacaggggctgctgttcactttagagattctgctcttctcctagaatatgttagtgtggtaggagacctcttcagggcttagttacgtaaaggttgcatttcatgaactgttttctttctcttgcaccctcttttcctatgatctgtttggaatccaaggttggttttcagctgaattttgcacactaatggaatttttaagtaactcatkgcttaaactatatttcatatgtcaaagggatatgttcgaagctagagtcaaattcttttctcattgaataargaatgtgtattgatttatattaataaaaaaatgttgtagaacaaatatttgcaaatacatttgttcatattgttcaaataagttataaaaagtaaacagaaatatagttttttccaacttcctttttctggttataatattccgatttctcttcctcatcaaaggcttagaagatatttactttctttgtaaaggttagcattggtttctgtgttaaactatctatagttaaactttgattatccaaatggaatgagaggatttaattattgctaagcagagaggtttaaaatggacgggaaaagaattgggggagtttaatctgtttagaatgattgagcattatctcttcatcttccacgccatttctccaaagttctccagtgttttccattcatctataaaggtgatgaccgcagatcctggtataaagaagacacctgaatagtaaactttgtgtttgataaatagccatttcaggaatttgaaataccatgggtaaatatttgaaacttctaaaaggcagaaatcagtagaaatatatgggtagacattttaaacttctaaaaggcagaaatcagtagaaatattataagactgaattaatttttcattagacttgttttaatcgaagtagctgcagtctggtattaaaatcatcacactgtcaattgttgttgttgttttttttaactgtctgtagaccaaaattacaagaagaagagaaacacacaaaggatatttggtaaaggcaggtggtcttgatgaataatgttcctttcattaacatatttcccttattaactgtgtaattaattgtacatagccaagggaagctatggaaattgcattttgagatgtatcaaagctgacttatgcttcagacttccatgcaatttaccattaatgaagccagagatggaagcctcaaatctataattattacttactgtttgaatgacaagcaaagaattttatcagcagagttttaaatgaaaggggattagcagctaatgttgaaattgttaatctttcttatgaaaataattttgaagaaaatgttttagtggaaagagagggttggggaagtatttgccattaaaatagcgatttcctgatacttcatgtgactttgtctacatttgacagcagggtgcaaatatttttgaaagtgaatgaatattttatagggtccagagctgctcatgcattctgggaatggattatgcaatagttccaaatgtcctggctggggtgagagactgtaagctagccagaggaaagagctgaggctaagaaaataaaatataggagaaaattatagaaaatccaaatatcctggctggggtgagagtctgtaagctagccagagaaaacagctaaggctaagaaaataaaatataggagaaaattctagaaaatccagatatcctggctggggtgagagtctgtaagctagccagagaaaagagctgaggcgaagacaataaaatataggagaaaattctagaaaaatgaaaattggtttattgtcccagatctgtacccttctccccctctgattgttcacttgattttagatggtgaatgacaaatattggtgaagaaaatcattccatgaaacactggtaaccatttgtccgaaacgccttcatggcagcactgccgtggctcagtacattgcacctgcacttccaaagtgaaggtgactgttacctgaaacccatgtgcctggcacacatgaccagccttggacacaagaggcctttgatcagaaactgggaggcactcccacattcccacaatgaaattccgtgggtgcctgtaccctgagttcatccaacacatggttactgatcatgtagggtgtaccaggctatgtcagacgttagagacaccatgaagagcaaacagttagcttatggggagtgcctaacgcacacctgccatttacatctttgtcctcatgattcttcccactgaaccaatggcactgactcaatatacgtggcgttggctggttagagcccgtgtcgctgtggacaggagaaaggacgtccagggagatggaccagtgtgccgtccttcacgtgtgttctggacttaacgtcacactcgagacatgctggctggtcagaacatctgggacctggaggcctgttaggttctttagaaagttctgggctcctcccacacgcggtgtccaaggacaacaggcaggtgaccacgtccactgcagatgtgcagttttcatctcttaaaaattctggttttctcaaacttgctgtctccctggtttcagtttgaaatggatttaatgggctagaacccctgtcagcctacgtcagcctgtgaatctttcacagaattgttttgtgttctttggaaagcagttcatgattgcaggagtcatttaataactggagcccggggggtctggaagaggtcgtacggccyctctgacctgtgggggataattcactcccaggaccatgcccggtcgcgatgcattgacaacgcagccctgtgtgcacacaggcacccggatgccttggtctgtgtttcaggagttgcctcatctgtggacaagcacatcacggcgtcccaggttaggttagtgattcggttgtctttacattttaaatttggggtttagctatgggcagttaattttctatggtactttgagcaaacttactttgacgaaagctgaatagtgccattcaatatctgaatgtcttgcccatgtaacaaaagcatgaaggctattggaaatatcagagttgtggatagaatttttcagrtttttatccagactgttaacttcaggtaacttaagkgtaggtatgaccttgcttctcagatcaaatcattagggtctttccttgctgtggttctgtgaggggtgaagagtttaaacaatgacaaaatattttgcaagctaaagagctgaagacaacttargtgtgtgaggaagggcaggtcagatgagcagacgggaatcctaggacgtgttgcctgcaggacgcggtgcaccctgcccagttctctcattcgcccgcctccactgctgttccccacgcgctgttccccatgccacagccactgcctgctcttccatggtgggctgcagcagtcctgacttgcatcctgcactgccacctgggaaccagggtggtcttccaaaagcgccaccatcaaccaccatcacaagcatctttggcttaaaactcatgaaagcttcccgtggctcttaaaataaactgctgagtccttgcaggccaacagctcctggtctgccggacaccgttgccctcacatccattccttctctgcagccccgaccttccctcctcccggagtggccacgccctcctgccctgggctccagccttcactgcccttccctgtaggaccccacccccactcaggccctgcccaggtccttagcatcggggactcggcccatggctctgagagtttacccttcagaggggccccctcagtgccatcccaggtgcaccccgtccccacacccaggctctgcgtcgtgactcttgtccgcatcttcttactactcactgttgtctgaaatcactttttaaagctgtgtttatctacttgcagatggtctgccctccagctaaagaaattaatgaggccaggcgttgtagctcatgcctataatcccagtactgtgggaggccaaggcaggcagatcacccgaggtcaggagtttgagcccagccyggccaacatggtaaaaccctgtctctactaaaaatacaaaaatttcgttttcgtatgatggtttgcacctgtagtcctagctacttgggaggctgaggcaggaggattgcttgaacccaggaggtggaggttacagtgagctgagatcataccactgcactccagcctgggcaacagagtgagactctgtctcaaaaaaaaaaaaaagaaaagaaaagaaactaaagaaatgagccacatgaggacagggtctttggccagctaactactgtgctcccgaacctaggtcatccctggcttataggacgtgcttaatcaaactggatgactgaagggacagatgactagaccaccacaacatcggcaggaatccgacagaaatgacagcagctcttagccctctgtcccaaaaccagatgaggcattcacatttcacttagaatgccaagcagacctcttttgccctaaatttaaatattaatagctgtacatttatggaaaacatagtataattctctgaattattttccattgcttataagcattcatctctgtattttacctatgttcacataaccttaatttttaagatgttaaataagataataagattcataaaattgttcatttaaaattctttgcgcttctctgagaatgacagcctgaaatacaaagtgatgcctctgtcatcatccccattattaaacagcttctttcttagtctttctgcaggtgacccctgtcaccccctcctacgcacactccctaatatgatatcttgctaaaaaatgcccaacgtaaaacaatccatcaatcgtatgaaagaacaagactttcccctacttagtaagagtaggtggtaaggaaaaaattacttatctttttaagtttattaattagaacatttctagaacacaatgtgttcactattaacatcttccattggggtttttgttgttaagtctttatcaaattgtcatatttttctgtaaatgtgtaacagaagtttagtggaagtcataaactgaaatcgaggatcaccaggcgttggtgcaccaggccacctttccacgcatcgcaggtcttcatgcagtccttctagaggtgaggcagagactgggccggctgtggactccaggaagtaccctgcaggtcacctgggcattgtgtaagaactcctttgtcagtgtgatttcttacaactctggactttgttatcgatttggaacatcaaaagccaaattataataaaaatacactaattaaagtttctactcaatcaagatagagccagttttcatgtcctcttaacacaccactttgcaaagagttaaccttcctttccctttgctcttcggaaagtacgtaaggtctgtgatcatgtcccagtgcctctattagaggcaaggaatctgtcctcttacagtgtttttctaacaggactttgaaaaaagcatgtcattttcttgacagccttatctgaagggcattcttaattctctctttttttttttttttttgagacggagtctcgctctgtcgcccaggctggagtgcagtggcacaatctcggctcactgcaagctccgcctccygggttcacgccgttctcctgcctcagcctcctgtgtagctgggactacaggtgcccaccaccacgcctggctaattttttgtatttttagcagagacggggtttcaccgtgttagccaggatggactcgatctcctgacctcgtgatccacccgcctcggcctcccaaagtgctgggattacaggcgcccgccaccacgcctggctaattttttgtatttttagtagagacagggtttcaccgtgttagccaggatggtctcgatctcctgacctcgtgatcygcccgcctcagcctcccaaagtgctgggattcttaattctcagtgagtgaatttatttttcaatgatgaaaaagttttaaataaagcagatagttcagtagcgttcccggtctcaaaaccaacacgcaccacacgttgtttccccttctacgctttgttcctgcygctgctacttcaccttctccacccgaactgcataccaactggggactttctccggaagattccattttgaagtatttgaacttttctccactaccttaatggtttataattttctgttactccacagtttgattggtaacaaggcaaagaatggaaatggatttctaagtcacattaagacgcagggagaacagttttcaagggtctctgggcttgccagagattctaggtggtcctcagaataggtcagctggagacaaaactctcagagaaagagcttggaataaatggcattaattcacatccatcagggaagccagttgtggtgcccacaggaggaggcttttgccagtttcatctgtgttgaccacttcccagttccctgcggtaagggaagcatatgacttactgcagatacgtgtgggaatgcctcctccttacaaacaagttgtcaggaaagcagtttttaaaatgtgatcaaaagcgagaagaccccatgaatggtctttcacacactcttgttaattccttgggtcccatttctacttctttttggctttgtacggatgacccagaggctgaattccaaaaccgtgtgtttgcttctcccgagcaaactccaccctggcatgcaggcacacttcgagttggctgccatgggcctgtgccttttggtaatgtgtgcatatctgccctgcatctcaagttgcttgtttggagagccggaacaatgcctgtttcagctgttgagtaagacccgtaattccatggcaagtcaaaggtgctgccgtgacgggcacacggtgtgttagaggagcgggatggtgaagaagccggttcactccctgccgcctcacgttgtgggcattgctttctgagagtgagatggcaagttgaatatggtcgtatgggtcgggattcctgtttcaggaagagctttcttaaactaagaaatagtgaaactatcttctgatcctttaaccattatctgttcttctttgtgttcacatgtactactttgaatttctaattttaaatattttaacattcctgctgcataatattaacaaataatatttaaaatatgccagatgcagcaatctacagacaataaaataccttctcatcaagggtttgctgctcccgaagcccccatagctgtgtgtgctgagccaggacaatcaacctcatcgaacttctcctttcatcttttcacagttttgcttggaattcaattgtcctacttttggaattcaaaaatttaacatgaatatttcccgttcatgtattaatgaagacaggtgactgtgtttatttttaaagaaagaaaaggtcatcatttccccaagtggcagtggaagcagcttagtccttgcttttaaaagcattactctaacttgtgacttcaacacacaaacctgtggtctcgtcacaagaaggaaaatgtaaagggattctattattcgttttaacaaaaggtttgattgtaatgttcagtaaattaaagggcattgtgctgcaataggcgccattgtagaaaagagaagtatagccttcccagtaatgactgggttccccaaagcccagctttctttaacacgccttgttctacagtgggaagaagtctccactgctggcagcatcgttgtaggaacgaagtttcaccaggacagtttccactcgtcccatatccgaagacccacggagtgatgatgggcgcctccagtcatccgtggggactcactttccactgcacgagtggtttgattgatgagaaataatgccagatggaccggcttttgctcatttttaaatagtccactgagttttaggagtccttaggactccttaggagttttagtattgcatggtgggagtttattctcattattatttttaataataataataaatcatcttgcacctctcagtatctcacttcttcattgttacagccaacagatagatgccaaaataacctaatttctgtgactctgaatggagctgaaatagcactgacctgctccagcctttcttctgcctccccatgggttctgcggtgtctttggcagcagggtctgcaggaacaggtgaatcagcattggctgacccaggatcccagtgcctgtggacgggattcacatggaaccacatctggaccctttacaagtctccagatgcactaccccagtactcagaggtggcagctgcacttcctcctggtgccaacaggaaggcgagcatgtttcgtgtgagcgggtcctgcatcagatgcacacgggatgctggtgtgctcttcccaccggagaaattgtccttgttaactagcagtttagtgtcacatagtctcttaaacaggcatttcctaggatttcctctcctgaagacaggccatgaaatatttccctcttcaaaaaagaagtgaacagaagagagtggacrtgttgtatttccttaaacaagaggataagagtctccccagaaccgcagtgcagccacagagcgtgggagggaactcaggagtctttccagtaccctcttcctctrctgaaacactgagaccgtcccgcaccccatccccgggcacacaccttctactgtgtctcccatattcacgcatcacccctcaaaacctccttgggaacatagactctggctctcccctgtgagctgtgatgaccaggttacgaaggggtgcacccgtggggctcagtcagatggcctgacttgccggaaggctccacgccaaaaagtagctgtgggagggacccacaccgttctgtgtaagactgttaagaactctatcaacacaaagtccagtgccttcccagtgtgttcatgtgcgttcctgttccacagaagctcctttccatgttcatctctgcgagtgacrgggtggttcctctcctgaagagaaggtgctcttgcaatcgttaacagacactgttgtgttctggactgtctgtgctccgtgttcctagaaatcagccccttgacctcaaggtgttgaccatttgaccggaagacggtgctgacgacatttgtgctatgtaatacattgtgaacacattctccctcaaagtgttcatggcaatcacacttttgttacacaaattttggggttctgtgtataatgattccattaaatgtggaagccagttggtttgcctgacacatggaggctgtttcctccaaaacccgtctagcagcacccagtcttgtgacccagtgactgtccttaatgctccaaccctaaatggtctcrtaggatgagctagaaaacaccatgagacagggactggcaggatggattcagaaacgggagaaggatgacaggggaaaccttagattgagttcatatctctaacaaagtagattatgtgagcgctgatggtgtcattctcaaagggtgagaacgcgaaaaagaatgcagccacatcttcagctgctgtggtgtggatgtcgtgtgctctgggatctacgtcagatagtgaatgttggcaacacccttgggaaacccacttcctgagtccccgtagctttctccatgaatggtttgatctaggaattcactcttccacaagcacatcatgtctaggccctcaggaagtatgagaatttgrgaaggttggagacaccttttcactcagggcttatctagaaacagcttaagtaaaattcccttaatggagtttaaaaatatgaaaatgtcagactgagttctcccagccaagagcccttcaaaacccaaaattatagagcaagcagctctaaaagacgaaagacacacctccaaacgcttcctaaggatcagggaacagacagcaactccaacttccctaagcacttcagcctgcatcgactgagattcaccaccaattcttcgctccctgttttcactcttcatggatttcctgatgtgagcacgcattgtggtgcaatcccgccttcactggctcactccctctggtattgtcagcctcagtcagctcattctagagctttcttcataaagcttcaactcagaggcactgacggagagcccagagcaaggagctgtgtgaagtgggacacggtgtgagaaggggtccctgaccaccaggagctcacgccccggaggagacccagctgcaggtgcggtgcacactggtgcctggaggccactgagaaggctccaggggagatggagcaccccacctgggacctggactgtggagaatgagggagatgtgaaaaaaggagaagagttgtggaggagacttgtagagaagagctctctgaactgttgcccttccaaatttatacractgctgttaggttcaggttgttacaggaacactcaatgagctgacacctgtctgtcatgagttacagtgatgtttgctgggcaaccccagaaaggaagatggcagcaaggtcatgtatagtaaaacattccaagttccttatgctcctttttggagaagttcttccaagtttcagaagattcaaaggcagtgttttggatgcccatcatcaaaatraaatgtttacctataatataaatcacttgtagagatttccagattatgcattattattccacagatattggctgagtgcttgctgcctgtgctgagcagctgaaacacagtccctgccctaaaaaaattaatctcatgagaagaatcagagcttgaaacccacagttaaagcaacaggaagaatgtgacgaatgccacagagacgtatgtttgaagtagtaactgtttgatgtggggggtgggttatagggaagaaagatcatggggtggggtaggtaatgggcatgtcctgaccggactcctggaggaggaagtgttgtctgaactgcaccttgaagtctgggtcggttcattacagaaaaatcagcacaaaatgtagagaaggatggcggtggggacggggcaaaggctgagaagcagtcttatgggatagaaagtatcagattagtaaaaggaaattcagaaaaaggacaatgctagtctaggcacccttggtaatttttttaaataggttatattttgcaccagaaacgccaacctggtcgttcagtgaaaaagcaactggaaaggggargcgatggtaagaagatcagcragaaggctgcagtgacgggccaggagaaaacccacagggcatttcagaggccaggctcaggctttggtgctgccactggctgctgggggctgtggaccaattgcttaccttctctaggccttggtttccttatctgtaagatgtgagcctcatctctgcattttttcactttaaagcagtaaattgtattctgttgaggatgtccaaagctgaaatgaaggtactcagcactgggggaaaaggttgccttacagtttgctgtgggccctggggttattcgttgccattctgcttatcttcattttcttttcttttctacatatgctatttatgtaacaaaagttgcagtgccttaagaaactaagccgtcccaccaccacactctctcacacatgcactcatctataaaataaaagaatttaaatgtcaaggttttttttctgagctaacttttttatgatttttttccatttattggggtacaggtggtatttagttacatgaataagttctttagtggtgatttgtgagattttggtgacatatcacctgagcagtatacactgcaccatatttgttaatcttttatccctcgcccccctccttctcctcccctcaagtccccaaagtccattgtatctttcttatgcctctgcatcctcatagcttagctcccacatattagtgagaacatatggttgggttttccattcctgagttacttaacttggaagaatagtctccagtctcatccgggtcactgcaaatgctgttaattcattcctttttatggctgtgtagtattccatcatatgtatgtaccacagtttccttatcctctcattgattgataagcatttgggtttgttccacaattttatagctgtgaattgtgctgctataaacatgcatgtgcaagtatatttttcgtataatgacatcttttcctctaggtaaatacccagtagtgggattgccggatcatatggtatttctacttttagttctttaacaaatctccacactgttttctatagtggctgtactagtttacattcccatcagcagcgaagaagtgttccctgttcactgcatccacaccaacatctactgtttattgattttttggttatggccattcttgcaggaggaaggtggtattgcattgtggttttgatatgcatttccctgatcattagtgatgttgagcattttttcatatgtctgttggtcatttgtatatcttcttttgagaattgtctattcatgtccttagcccactttttgataggattgtgtttttttttcttactgatttgtttgcttaaatgtcagttttaaaaacacctatagctaaatgcccactaccagggaaaagccacaaatactgtttaaattacatgttaatttcctaataattccagaagacgtctgagtagagttgctatacttgtccaagttcacatgcaggatgaccacagtatagacggcccccaacttatgatggtttgactttacagtgcagaagcaacacgcattaaatagaaactgaacttcaagtacccatgcaaccattctgttactcactttcagttcagtgttcaatgaatcatgtaagatattcaacactttatcctcagtaggctttgtgtgagatgggtttgcccagcagcagaggaaggtaggtattctgagcatgtgtaaggcaggctaggctcagctgtgacactcagtaggttacctgtgttcaatgcactttttttttttttgagacggagtttcactctggtcacccagactggagtgcaatgatgcgatctcggttcactgcaacatccgcttcccaggttcaagcgattctcctgcctcagtctcccgagtagttgggcttagaggcgcccgccaccatgcccgactaatttttgtatttttagtagagacaaggtktcaccatgttggccaggctggtctcgaactcctggcctcaggtgatccacccgcctcagccttccaaagtgmtaggattataggcgtgagccaccgagcccggcctcaatgcactttcaacttaagaagttcttgggccataacccatcataagtaggggagcatctgtactaagctcccgtggtaccttttggttttgctttcattgtttaaaacattactttgctatgaaggcctagcttccccacagactcacagatgaaaagcatcttatctacaagccatgaaagagaaaaaagactcctaagatgtagttgggggatatttcatcagtttaatatcacaaaggatgtttcataaaaaatattgatagaagaatacagaacagatcaaattgaaatgagcagaacgggacaaacacagcccactggagtggcgtgtgcagagagatgtcagctctatctcagttttaatagagtcacgtgcctctgcagatgacttcattctccgtgaaaaaacatcgcgtcagtatctacctcttcctccctcctaccacccaaccttgggccacacaggctcagtttatatttttgccataaatttagaaattcaagagaacttagagtgtaattttgcttcctatagttaagataaatgtgagaatttaaatagctgtagtttatacraattaagataatatccagtgcctcttttgcagataatattttcgattggattaaacctgctagggttcatcattttagaacccatcatgttttactgaaggaagcccatttgtttgtgatggattttatgaaaagagcatttttcaaagaaaagctaggacccagaatgattttgccaggaaccattttcgacctacctatttgtagaactctacgtaagcccaacttgagaaaagtagccacagaaacagactgggactatcctttcaccataactatcaacctcccagcttccctcacacaccagatttgggctagatgagctggtcagtattttcacaaaacttaaatattatatcatccaaaaatgtttttcctattagggtaactttggtacaaaaatatgaatttgatgttccataatgattgtctcaaaagaaagaatgtgtagcatttcctagattgagccatttgaattttgcctaatttcacaactcgagacatctctgtggggtgcttcttccatgcacaaggaaaccacgaggcttcctgggtgtcggggctggtgacgggagtagatgaactcgttcgctttggctcagagcagccctgatgtttctgttcctggcgcaggtgtgctcccaaggctcaaggtgtggtgggggaaaagcgttcgctgcgtggagcaggcagtcggtgcggcttctcaacggcactggagtccctctgctttycccaactagctcaagcagggccatggtgggggtgacagtgacaacctgggacctcccaacagacggccttagagtgcccaccctgagccaggcgattgtccctcaccaccacacccacccagatgcgggggtgtcgcgcaaacagcacaggtgcccgatgcacctgctcccgtgtgagctgggccagcacagcagggtgtgtgtttgctgcatgggttcaggttggctgtggtcaaaacttccactagacggcacgatgacctgagattcccgcctcgccgtgtccagccctccctccctctgtgtctctttctctacctgtctcctggaacgggccccagtgggcagggagggaccatcccagctcctcggatcaatcgaaggggatgtcagggggtgggcagaaggtgagaagggcttggaccccgggcctgacattggaatgcgtggccgctttgcagcaaaggaccatgtgtacacatgcatgctttattttctcgtgtggacacacttggaacctgtgtctacacatgacacacagtaccttgcaaatccacaagcagagtgacagcagaygaggccgtcacttcctgtggtgccatagtgcagctgggtttggtcctttgaaatgttctttcttaaaatcagggcttgttctcaacggtacagatgaataagaaccgagtgggctgtgctggcggcatgggggtttttgtggaagggaattttcaggaggcctttgtttccttgtctactcatagtaatgctcaacgacaagcaccagaaaaattaagatcgaaacagccaagggttaaaatatttgcttccatccatttgtgtttgtttcatgctagaagctgtcccgcattttgcacagatcagagcagcccagtctctcaactgcatcacacccagtgggttcagaaacgtgcgccggttttaagaaaaatgacttccatgcaagcagaaatgggcacgcggagcagccccaccgagagcttggtctgagctccctggccctgtcgttaaagcatgtgataattgttgtcatctcagcggtaaactgattcccaaacaccggagtttatatttacatatgtaaaatgtgtgttaacaatgcacatatttcacttaacggttgcatggtatgatatgcattgtgcaccgtagcacaacgtcgcaccatggcccaggctygtgagcaaggtgggcatggcccaygcggcgagtgcaaaggcctccgctgccttttgtgcatctgccggtctgggctcaccacctaggtgcgctcctgaccctgtgtttccctttcagtcctacatggaggaccacctgaagaacaagaaccggctggagaaggagtgggaagcgctgtgcgcctaccaggcggagcccaacagctcgttcgtggcccagagggaggagaacgtgcccaagaaccgctccctggccgtgctgacctgtacgtaccagccccgggggcaggaagcctgggttacgggcggtggaaactggccgtgctgacctgtacataccaggcccgagggcaggaggccagggttccgggcggaggaamctggccgtgctgacctgtgtgtaccagccctaggggcaggaggccagggtgacaggagtgggaacctggccgtgctgacctgtgtgtaccagccccggggacgggaggcctgggttacaggcagtggaaactagccgtgctgacctgtacataccagcaccgggggcgggaggactgggttacaggagggggaaactggccgtgctgacctgtacataccagccccgggggcaggtggccagggtgacaggagggggaaactggccatgctgacctgtacataccagtcccgggggcaggaggcctgggttacaggcgggggaaactggccatgctgacctgtacataccagtcccgggggcaggaggcctgggttacaggcgggggaaactggccatgctgacctgtgtgtaccagtccccggggagggaggcctgggttacaggcgggggaaacagccccatcctgagggtctgcaaagccctccgcttctccttcccggcaccccccgcctgcagcagacttgccccctctgggaaggccctcctgggaatctcccctctgcgatgccatccccagcccaaccaacaaggaaccagtgtcttcctttcctccagcacgggcctggggacatctgcaccccagtgagcatcagctctattgttctctgtcaccgagtgacttgagacatgttcctgaacctcttggagcctccacgtcacatctgtaattggggtcacgctgtcgtccttgaagtattactgctgtaagggttagacgaggtcattagcatagcaccggtacgtcgcaggcacacaatcaacagtggttgcttttacagcatctttaactttacaattatttccacaaactgagcacctactacctagctagggatcactgccagaaaatggaaatataagccagcagttctccgagtgactctcgtggactggaagagacaccgcctcgtgttcccacagcacgggaggcactaagctgcttacaagatgaggagggcaaggactgcccggcgctggcgtccacctcactcatcctctatgtgtatagcaggttccaatgaaggttccacactttgattggttataaacccacccgccaggaggaagggggtcctagatatgttcctgaccagagtttcagggggaagtagatactcacaacgttgagtgatgaatgataaatgacagtgtgggtagagtttcttagttactctcctgaggaccctaagacaaggcccttgcgcatgtctctgatgcaacagagggagcttcgtcagctcacacttcgagagcaccactcggccacactcactttcagctcagcatcaggcgggaccagtgtcccctgtggccgaggccgtctctccgtcactgtgtccctgcctcaacccttcggagccggtcaagggatcagactggtgtccctgagacaccgcctgtccccgtaccagcagcacagccccccacgccagggagaggcactgcccttgccctccttccagccctcaggaagtgttacaggtcagaacagtgagaagctggaatcttgttttgcttcagaaactaacctggggcactgcagacctgtgtaaaatcccattcacccagctgggtgcacgcttcttgctacccrtttagtgttcagaccagtttctatgaggtctgagggttttaaccctaaagagatctaaaaacagaagctgtgtgatttataaattttatatttagaagaaaagcaaaatacaatacatcccattagccaactaacagatatttactaagcaccggccctgtgtcgggggctactaacaggctctgggggcctggccactgtcctcagagaggagcagcctgggggaggagagggcggggagtgaagccggtgtggtaggacaagtgagggtggtggtgagcgggtatcctgctgagtcctgagtggagaatggttcgtggtaaatagccatgcagtaagcgtgcattatatgtctctgtgtgtctggtcatttacttagattgtgaggtgtttcatggtaaatattcatctgacagcacgccctccccaaagacagcccggagcgtggcagaaacgacctgccgatggggttttcctcccgtgtgccctgcagccttctgggctctgtctgtacagtgtggatgggggggttgggggcgagggacctagtgatggtgaagtggtccgtgctcagatgggacacaggcagcctccccaggtagcagccggtgccaacagggtggccacatgtggatgggcgcctgatgttctcatggggatcaggacagccctgcccattctgagccaggtgacgggtgagggggaaagcacctccctcccgagactcgcactggagccagaaagaagctgcctgcacctcctcccagggttctcccgacccatgtgccagggtgtgaagacacagcactgcccttcagggttgagaggccaccagggaagacagagaacggcaagttcacctcctgggagaaccctagatagaaatattttcatgaacacataggtttattctgagcaaacttgtattacctactttcttctccatactcttggccatcttgcttttgggaaggagatcttgtcctccgggagacagtggcttggcaaaagctctcgctgttgccaggccccagagagatggccgcctcctccatcttcactcctgcctcacctgcggccgctgcgctcttcacaggacacaactggctccaaaacagccacacacggtccaggaggactggcttccctgtggctctgtggcttggaargcccatgctgcgctgtcatggtggggggacggcactcgagctgggctccatgctgtcctctgtgtcgcgatggaagcgagtctgcatgctgggcatgcactatcctctgtgcagggttggaagcatgagtactcggccacgctgtcctctgttagggatggaaccttcaagtcctccctctgcacctgcckctcccaccgcgtcctttccgcgtgctcaccgggaactcccaggtctatggaaagggtcctcgggaccacccctcccttctctcatgccccgccttccccatggagcacttccctgggtcattcttccacccaggagatggacacagtcgcccgacttcccagatgcaccctgatcggaatgagcccccaaaggagaaggaaacacacattatgcaatgcttggctggcaccatgctaggtctagttgtattatctcagaagtttaaagaacttaacatgcattttctgttttttgaatgtttaaaaaagaattatgcagcatttcgcttgtctgcatttcagatgaagaacagggatatgatactattttggtgccatatcctaaacaaaaaagtatttttggctctatgttgtaataacgagagagagagagagaaccaggacaaacaatgcagagagacaagacagagacaacgaagagctgaaggctcagggacaggaagacagcaaggaggagagtcatgtggggttcacatctcccagcttctgagggcattgctgctggaggaccacagctgcctcacagccagaggcgcggctgtgggcatctcccaggcccttgccttgcagcgtggtccagtgaggcagaggcccagctgatcaccgttcccaggagtcagggtcaccacactggccctgcgctgcagctgcttgagcagcatcctaaccatggcatcactggggcatcgtgagccagcatcccccgtgctctgcgctgcagctgcgtgaacagcgtcctaaccacagcatcactggggcatcgtgagccagcgtcgcccgtgctctgcgctgcagctgcgtgaacggcgtcctaaccacggcatcactggggcatcgtgagccagcgtcgcccgtgctctgcgctgcagctgcgtgaacggcgtcctaaccacggcatcactggggcatcgtgagccagcgtcscccgtgctctgcgctgcagctgcgtgaacggcgtcctaaccacggcatcactggggcatcgtgagccagcgtcccccgtgctctgcgctgcagctgcgtgagcagtgtcctaaccacggcatcactggggcatcgtgagccagcgtcccccatgcccgtggatgtgccacctctggtcctcacaagaaacccccccacttggccgacaagaactttggggtttagagcccgcccgtcagagctgaaatccagactccccagtgccatcctcataggctgtcttgggctcacctgagattgtgcgtgtgtgttgggaaaatccatgtccatttcaaacttctacagaagtatttgaaacatgtacaagggctgaagcactttggctaagcatagctttccttagaatactcagaaaacaatttatttctaaataaacctttggtttagtttttttttttttctctcccaaaactctaaacagagtcccctaagaggaatattttgccttggttacttctgagtgaccaaaagttatcatgatttgcttttaaagatgaatacgtgggtgattctcctaactctgatgattaagccagggttttctttttccttccatagaaaaaggttctgggcatatatgtcacctcgccaagaaagttgctggagagagactcccagcctggctgccttcccttcaccccttttgatctcagtgccagccgactctgccctaggatttgggaaggctgtcggtttgttggtgttggaaagaaaatatcccagcaaattctgtgtgggcctttttctttgctacctcacaggcagaagctgttctgggcagctgttctgccagagactgaggattcttttttaggaagagatctacagagtccttctcattaggctacttctcgaagggaaagattgtctaaaagcatcatctctgaactacaactgcaagtgcaccttccgtgagctcttcaggacctccagtgcaaagaaacagtgccggtggggttgtcaggagccacgttgatactccacacagttcagctgctcaaagttcagattttagatcctctttgctctctttcttaaaactgaaccgataggttggtaagatgtctggcctggtgtggcatggctacccgtccttctcacatcctccttccgattccgcttacagaatcttcgtgtggggagggtctcacagtgtggggcgagcctggccttcggggtggcagcagccgggctcaccgtctcctgggcgcmctgtttcccgtgacttggaagacctaccctccagaggggccccaggccacggtgtgcttcttcctggatcaggcctcccactttatccaccagaagttacgttcatcctgccaggtgcacatctcagcgccggctgattctgaggccgaacccactaacatccagagtcttttccttaaggtcttcggtggagcccagggcctcgcgcaccccccaccccccgttggtgacagtcaagtttaacaggagaatcgagccttgtgttcatctcctgtaaccgattctcgttcagcctccagagcttgtggttcctgagtcactgcgtcacctccctctcagctcggcaccatctgctcgttttataaacatgtttttcacgtcgtcaagtcattgataaaaacacattccgcaggaccagtgctgagccaatcctcccccgtgacgcggatccaccgcgggacttcccaggcgctggttccagggctgagattgtttccacggcccggccttgcgatggggtcaccccagccgtccccaggtcccgagcatattggcaaaggctcatcagatgtttccacgtgaggctcggggctaaacacctccttttcatcctcgaaacagccctgagattcacacagggacagagctggggctgaaggaggttagggagcccaaggtcagcggctccccggagagtgcagcctacactaccccagcgcagacccagccgcaacccacgcacaccgctcttgcagggccctctctggagcagaagtgtggctggcttagcatgacttcctcccccactttttattacaagagttttaaacactcaagtggaaggggtagcgtggcatcgcctgcacacccaccacccacgctggccagccgcccagtgttggccgtattagcgtgacctgcgagcacttcatttattttctggctggacgacttcaagtaagtatcaggcgtcatgacgtccaaatactttagcctgcctgcaggtcctaaatacaagggccttctcctaggtagctgcagccccgttataactaagaaaattaacaacaatccctcagtgccctctaacacccagctgtgcccatctgcccaggctttggagacagcagatgagcaggtgaaaccacagaattgcatttccccatagtcctggaggccggaggctgcggtccaggatgtggcagggctggccgtgtccgaggccctccctggggcttgcaggtgctgtctgtaactaagggtcccctttgtttaaggacagcagacccactgcactaggccccccctcaggacctcaccttcacttactggcctctctagaggccctgtctccaaacatggccacactccgcagtcctgggggttggggtcgtcacacaggggcatcagggcacagctcagcccacagcgccattgctatcacacactcccagggactcccgccgctttctctacaacacggtctgttatctgttgtctgttttgttttttccaccaggatgcagtcaagattcatcattgcattttgggttttgtgtctctttcgtctttttaattttgaaacagctgtccctgactttttttcctgatatgaatggtacctaataaagctgttcttttagtgaccactttcccattccaaacaatcacagactctccatgtggaagtctgtagggaactctgcaagcccacgagaagctcacctgcccccttccagaacccccgtttcccaagaacccggagtgtacaggtctccacgatgctgtaggaacatgaccagcctgctctgcgaccttgccacgggccacagacttcaaaccctgccttggccctgagctccaccctggccctcccctgtcctcccccttcctcccctgtcttccccctcctctscgtcctcctttttcctcctcccacctctttcatggttccctgtgttctgattggccggttgagcagtcctgctgcagaacgatgctttccaaggcatcccgttgcttgtggtcttccaccagcaagaatgtggaggccagccctgtgagctcacagagtcacagttgtgacgggagggtcgcccctggccatgtggcctgtaaggggctcgaggagtccggatagcagcgccgaggtctgctcgtggtgagagaccccgagtcccggcacactgtgggggggccgcaggacggcggcccggggtgccctcgggacccctgcgctccgagactcgaggactacgcgacaaacggcagttcaggctgccgcgggtgcaggtttgctcatccacggccgccgggttagggagacgattctggcacgttccaggcaggccggtgtcgggagagggtccctgcgtgtgggagacggaggcggcggggtcggctggagaaccggggaaggaacgcggcggcctcctcccgcgggaagaggcccaagccgggctcgccctgcggctcagcgaggagcccgccctgccggcttctgaggacgcgccccggaccctgctctcctgggcctgaggtgacacgttctgtcgattgaggccccgaggtttgcggaagtctctggccgcagccgcgggaggcgcaacacgctgaggctgcgcgacgtggggcccgcccggacccgcctccgcccgtgtctccccgcagccgtctctgccagaactatcggaagagaccggaactgttggttttgtgtctgtgagaagagcagcactgggaataagtcacctgctgagctgacagcggaaacgaaggacaagcggagtcgcctagcgccgtcgctgcttagcccrgaaaacggcctcgtcagcgccctcgacctgtttgcggaccgyttcaggagctgaaggaaccaccgaggttctgcggctgaggcgggaggcgggactggagacggggccgggcctgtccctccggatgcggggggcgctgccctgttcagccgcagggctctccctgcctcctcctccggccacccaggccggaagcaccccggcccctcctcagggactctccctgtcagtgagatcaaccctccggagctgctgtgtcttcacggagccgcagacccgggcggggaggcggggccttcggctgccgtggggtgtggggggccctgccctggccggggtgtgccgccggagctgctcccacccgcttccccgcttcaccccagcgcctctgtggatgccctttgaccgcgacccctcccgtgcggcggaagtgagttgctcccgcgagctgtttgggcgttttccacacctgcccatcagttacgcctctagggagctaatgtgtaggttcccgccgaatttcctcccttacttttccagacgcgcctgcttggcacagtctgccctgcgccccgtgctgtggggtcagaggtcactgccttctgcggctcccctggcagccccaagaccgtcggtcacaggtgcagcttctgcccccgatccacaaaacgggcgttaatctcaggcagcacagccacaagccagagctgttcttctggtgataccctgtgtcctggtgataaggcgtgtgagctgccccctgctcctagtttcagctccttggaggcgccccccagccgtttgtgtctctgtcttgccgccgccacactcatctgcgctgctcgcacagacgagattcgtcatcagtgtcgatggacggcctctcggtggagccgtgcagacagcgtggccctgcctgtctgatatctgtgctcctgttacagcaaactgttctagttcctgcgagaaagtcgccaccagcgcacrcagccacgcctcgctgtgtgtctggagctggtctctgggttgcccacactccacaactgcaggctggctccaggcggcgctttctccgtgcaggcaccaggtgctgctcagggcatgggaagccaaacccaggtcgctccaggtgctctgggcctggagggctgcagggacagagcgccagggatgggcagtgtatgtggccaaagcaggctgtctcccattccggaggccagaaatggaggtcagggtgtcagcagggctggcttctctggaggcctcgctcctcagcacgaccacggctgtcttcgtcttcacacgggcgctctccctccgcgtgtccccagcatgactgcggctgtcttcgtcttcacacgggcgctctccctccgcgtgtccccagcatgactgcggctgtcttcgtcttcacacgggcgctctccctcygcgtgtccccagcatgactgcggctgtcttcgtcttcacacgggcgcgctccctccgcgtgtccccagcatgaccgcggctgtcttcgtcttcacacgggcgctctccctcccgtgtgggtgtgcagagtccttcttcctaacagcacgccagtcatattgcattagggccgcccaaatgccctccgctcgcttacctctgtaaagaccctatttccaaataaggtcatgttcccagggctgggactccagtgtgtctttttgggggagggtacgcagctcaaccctgggacctggtgcctccaagtcagctcagtgactgggcgggcgctgcctggccacggcaacccccacacacctttggcgtctgttccccctgcattctgcccccgcatagccctgcctggggagttccttctacacagatgcctgagatgagactagtgtgggttaaaatcgcttcaggtatgggaatcccccagggcttgaggctccttctagtccacctgccccaggtcacctgcccaacatgcttccgatcccattgrggggcgactttctgagagatctgtctgtgggggatgccagtgaaaccatttaagacatgagacactaaaccagccttgtgaccatgccatttggggccactgttgctcctctgggacctgcttttgacgcgtccagtgtggaagccggacaccagcctcgcgctcggttattcagctcagcggtgrgcagcgtgcytcctgagtggtgggtggggcaggtctcattttcatgaccatctctggatgtagcagggctttctggatatgagccccagcctgtcccagtctgcccagatgcagcattgtatgctgagctgcggaggccctgaatgacactcagctgactttcctaaatgttcgatgagctttatagcttgagctgagcatttcccaaaggcatagttggaagcagaatgtctgcctgctgactaaggacaggagcgtgtgggaggaagaggacctgccccttcagaatgcgttctgtcatcacgctgttgctggtcttcaagtgcccaggtctgcaaagaatcaagcccatgtagcttctcagagtattgaaacaaacgtggtccgatcatttattcctttgcctcaactatgacaagttcaaaggcctttctgtgtgtgagccgctgggatccctaagcagcactgacggcccttgctgacggccagcagccccgggatgtgcctttgcagccctcagacctcgatggacaccataaactcggagcaggagcttgtgggtgctggtgccaactgtggagcacatcccggaacatgttctctgctggagtcaggactccctctaggagcaagacaccggctccacctctccacaggccacaccatcaacatgaagaagagggcctcctgccagcataaatgactgagcctaaaccttcacagaaagcagaggcagttggagagcccgagagaacacctgagacccctgagtggaaggaaccccattgccgagttccgtgaggcccctgggaggagggaaccccattgccaagttccgtgaggcccctggactcagcagtggcttcacagatggcctcacgcatcctccaaacagcagcaccgtggagcccatgtgctggtgggaggcagattcttggccctgcagagcagcttcctgagtgtggacagcaagccaggaggcctgggggaatgccgtcctcagggatctgtgtagcaagacgatgttccgggcagaggagtcttccacacgctttcctcagatgcagtggggtgggcacgggaggttctagatcatgattaatgactataccgccgcgtcctctagcatgcttagctgggccatctcccaaggctctttgccatagtaataatcaacaagaaattgtgggatgtgtctcttctgttggcatctatgaaaaatcgctccatatgttctgccaccacggggcagcaagaacacgctttgccagcttggctgacctgcgcagttgggtgcgtgtccaccgtcatctcagccttgctcctcattgcttgctgcgtgccatttaccacaacagtgctgtgagttgtatgttatcatcctgcattctccgaacactgaacagtttacccaggatcgcccgctggcaagcagtggggctgggagtcaaaccctgtgctcccctgtggaccacgaggccgtggccacgtgaatcgttccatccttatgagtcttagtttcttcagcctaaaacgggaaagtagtccctgttctgtccgtggtccaggatggccactgggtccaggatgagagaagaggatctaatccgtgaaaatatggaacatctgagaaatttgaaatactctttttttttatatttaaaaaaaaatttttttgagacagagtttcactcttgttgtccaggctggagtgcaatggcacagtctcagctcactgcaacctctgcctcccgggttcaagcaattctcctgcctcagcctcccaagtagctgggattacagccgcccaccaccacgcctggctaatttttgtatttttagtagagacgtggttttgccactttggccagactggtctcgaactcctgacctcaggtgatccacccacctcagcctcccaaagtactgggattataggtgtgagccaccgcggccggcctgaaatattgttgaacaaggcactaacgcatgataaacacagtaaagggtcagaaaaggaacgtgcacagtgggttaatttaacccaatgacattaactcagttatagggccaggtgaaggaagactctacgtgagttcccacattttcctggcctctcagtaaattctcagactacggttttgatagagcacacccgttcttaatggaaacatgagccccaggctgytatgaattctcaccctgtggttcccgccattgctctgtgttgcctccccagggaggtctgatatttcatttgacaacagaagggagcagccttcagttccccgagcacaggccagggctgattgcgcgtgggcctgccctggcttcatctccagcctggggttggccttgagaggccccaggccacctgcttcccttcacttcatagaacacgaagacccctccacaggcctcgcacgtcaaggaaactgccctttaggggactcgggaactggatggcatcatcctatttgctctcaaaacatctcataaaaagtaagagaatcacaaaatagagattcgccaggcacatgaactctccgcacgaggaacggttgccgccccctgcaggaatcagagtccgccctcctccacagcctgcagcgtcccttggccctcccaggatggctccaagcatttcccggaggttccaaatgaccccatattacaaacacaatgattttgctggccaggcacagtggctcatgcctgtaatcccagcactttgggaggccgaggcaggtggatcatctgaggtcaggagtttgagaccaccctggccaacatggtgaagccctgtctctactaaaaatacaaaaattagccatgtgcagtggtgcgtgcctgtagtcccagctactcgggaggctgaggcaggagaatcacttgaacccgagaggtggaggttgcagtgatccaatattgtgccactgcacttgagcttgggtgacggagcaagaccctgtctctttaaaaaaaagacttcgctggtaatttsaaaagcaatatgttgacacaaaatcaaatatgcgatcaggaagtaggagctctccgaagtcatggaagccgggtccttgactcagtgccatctttaaagggtgacctcgggggaaatgaattcggctaaaacaattttccaccaagaagcccatggattgtccacttgccagcagggctcaggtgcccatggcagattccccctctgccatcgagaggagagggccgggctcgtagaatgcatgtctaactccccaggactcccgagctagggaagcattttcttaattttccaatgagaaaatccagctggcacttgtctgctgagtccaatggcagtggccactttccccgtggcctrttgctcacagggcctggcagcagggacccctcagctgaggaggagctcccagcacgctgccctgatgcctcctctgccctccgtagaggccaggccactggtctcagggtgccgtgggcaccatcaaagcacgagaccaagccaggtcaaaassctgagggctccaggctgcgctgcctgttccctgccctgctccctcctgaccctgctcttggtaatgccttctcagacacgtaagaacggtccgcagttgctggtctcacaagtgcctaaaggtggctgtgctgaaaatgaggcagggccctagaggcccctggaagcagccagaagcccctgcttttattcccacgctctgtgtgggctgcagcaccgggcccagcccagcacctctgaccacagcctcatctctggctgcggtgtctgtgtggccccactgtgaaactgggtttctggaatcaatgtttggagtagtgtgtgtggggtgttcagatgtcagagtcaaccagtttttttctgatgatttgtattacaatttcctgccactgccaattttcactctccaagaactaatttgtgcaggagctaaaagccattgagtccctgggatttttgcatcattcacaccttcgttcagagctgatgggatgacttgcagcttcatgacattcctgaggcattcagctgcatagagcatgtgcrtatgtacacatgcattcttctcctctctctagatgttttatcttatcccatcttgtcacccctgaaagaggctgacattcctacctgaaggaaggtgtcaggacagcatccaacctggagtgtattgatctctagtgcacagtactttcctagttcaatcagttaaaacactcactaagttttccaagccctaggatttgttgttttaaaaactgtaagtaaaatctccaagaaaaatgaaagaattgcgtagagaagcagagtccgtgcagcttcaccaccaccacactgctccatgattggggccacttccttctggtgccagcgcccacaggaggtgcgcagcgagtttggagtttggccacaggtccagaggggacccacggccaccaagcactggcctccgagggctccagcgagggtgcttttgttttctcagaaaagatggaaattggtgttgtgtgcagcaccaagaggttttccctgggacaaacggcagcagagccgagatgttgttgcttccagatttcagccagggatggcagtgacaggccctctggagtggccactaccatcacaccagctgcagcagggaggcgtaacctgggcatcctgttccacgcggcaggcaggaccccacccccacccccacgctggggaggagctacagctgcccaaaccgtagctgcagacccaggcagccctgcacacttaggcacccaggaagaagatccttgcccctgcaggaagtgcctgttcctgctacctggattctccctgctgttggcacccatgctgatcttggagcaaagtcagggctgagcccgggcgctgtcasagcccagcrggtgtgacactctgggcagtgctgacacaccagccccctgccacctcagccccctctggactttgggcaccaacaagcatgggagggaagccgaaggagggctgagggcagctcagctctggcctgcaggtgccccttggcacaaacagcctgggtgccatgaatggcagcaggagacagagattcctgggcaaaagggggcaggtcctccatgaagcaccaccttcaggccagggagggtttgaaggctgggggctgggctgcaagtcctgtggatcagagtgggaactcatggtgccttttccaggcctgcccacggccactcgtgggccaatcagcatgtacttcctcccctctgaggcccataaatgccccaggcatagccagagctgggcagacatggggatgaccagctgcagagaggagctacccactccagagcctcccctttgctaggagctgaacactcatcgggaccccctggctgcagaaaggagctgccccctgtgggagactgagctgttctattgctcgataaacccctcttcatcttgctcatcctccacttgtctccatacctcattcttcctggtcgcagaacaagaactcaggacctgtcgaatggtggggctagaagagctgtagcacaaacagggctgagacatgccccctgctcgccacactgtgggtgaagagaaggagagaacagctgtagcccttcagggagcccagacctgggagctcccggagctaggcctgtgactccatctttgggaccctgtggttcctggtatctccaaacttccaggagctaccatgttcctcagtgtcaaccatggaagctgcttgcagtgtgtctggtctggccgcagcctcacagagagcccgcacccatgctggcacctggagctgcccaccctgctgcagcacccagcgtgcctgactggtgtggccagaccccgtgctcctcacacacccctcgccactccatgcctgactcgcccttggcaggcatgggacccaggctggtagtgtgagccaaacgtggcctgccaggcccagcctgagcaaaacttgggcaaaggcgccaccggccacagagatttctggccagaaaaacaccaccccaaagatcctgtaacacaaagcgcaccttgcagagagaaggaagcggccacacaccagggagttgggaggtgcaggaggggctcttgcggcttccactcctctgtgagctctgcttgtcgaagtttctaaaaacagagcaaagaggagggcggccacagcaagcaggatgggggttatcccagaaccaaagccaagacagctctcatatcacacacgtcacaagtgcctactgtccccccgctgcgcccggcttcagcagccgtcaggttactctgtctgtccgagcgagtttttatgccagtctccaccagtacatttttcctccatttcctctttatctgcattttatttgtctcttactctccttttaaaactaaattccagtaatcttgaggacttaactgttcattgactatgaaactttctattttgaaacgcgggcgattgcttaacgttcatatttctgtttacctgctgtgtgttgccaagtgtgtctgtgatttaaaggccagcatggtataaaattctgcagaggaacccctgaccttggtgtgtgaactccacgtgggggaaaacaccaggatatctccattctgctgagcgggagctttgtgccagttccccacatgccgttcgtctgcctcccacctggaggatcacaaacggaggggaggatgggagcaggaacattggaaaccacattcagaagggtgtgagcagagtcctgggagaggatgcgggtgggccctggagcccgggcaggggtcccacactgctgggctataggccctggaggctgtttgggagtcccacactgctgtgtgatggaccctggaggctgggcaggggtcctgtgctgctgggtggggggccctggaggccaagtgggggtctcacactgctgggtgggccaatgttcctctgacccctgcactgtgtccttgcagatgaccactcccgggtcctgctgaaggcggagaacagccacagccactcagactacatcaacgctagccccatcgtaagtgcactgccgggacaggggccccaggctttcccttgggtggcacggacgcggcaaatcacgtgggaaggttctcgggggaaatcacgtccccacccagctcagcgtctctgcggtggacagggccgactctgcccattgggctcccgccactcccctgttccttcaccagcggggctgtttatgagccgtgtgggtcccggctcacgctgggcggtgggttccgtgacttgtagaacatccagcaatggtgactggacagtttcctgactagaagacatggcttttaggagaggttcgtagtgggtgccgttcctctttcctggagctacacattccctgtatattcatggggcatggggacatgaggcctcagtctacgctttttgtaacaatcagtggcttggaggcaggtccagaatttcaggttcgttttcctgaagtatttccagtgaatgggaccctgtttcttatgaaagagaccgtttgctggctgttcctccccctgggatagacgcaggtgcagtggagatcgggctgtcctgtgtttctggggacgagtgtggtggcagctcctgtgccgtgagttatgagtccctgtggcctgtggtccctcacttcccaggggctcctctcagcccatgctagacgcggctctcaccctatttaactctgggcatcccccttccctgtcatgacctgtcgggggagcagggctgaatggggaggtttgcagccctcccagagtgagcagaggagggagagatatgagcatggagagggctgaagccacaggctggggacactcggactgggtgttcagatgagcagtgatggtggcaggtggcgggggcgggatgggacactgtccagggccggggctttggagacctggcggatggcactttaaaccagtggtggagaggctggggctccatgcagatttatggcggacactggttgtcatgtttccccctttaaacagctcttctcaattctggtcttcagggaaggatgaggacatctcactaaaattccaaatttgcctttaatcaaacatggtgcctgcaggatgcaatgctgttctagggctgagtgagacggggcaggtgatcgaggcacaaatcgcaccctacggtgtcccaaagtttctttgctcgtccatagggagctttggatgaaagtattggcccaactgcctgcaggccacggccactgatggcggacagtgctcagctctcggctctgctgatctcagcagccactgatggtggagggtgctcagctctcggctctgctggtctcagcggccactgatgacggacggtgctcagctctcagctctgctggtctcagtggccactgatggcagatggcgctcagctctcagctctgctggtctcagcggtcactgatggtggagggtgctcagctctcagctctgctggtctcagtggccactgatggcagacagtgctcagctctcggctctgctggtctcggcggccactgatggcagacggtgctcagctctcggctctgctggtctcagyggccactgatgrcggacggtgctcagctctcggctctgctggtctcagyggccactgatggtggagggygctcagctctcrgctctgctggtctcagcacacctgtgggataaagcacgctgggaagatgtccacatgcctgagccagtcccgttttcccgcaattcgtggcccacacagtgagcatgttcagctttgagagactgaattcaaagtgaagaactggcctagtgtacttggtctacaccacctgaacccaggtttctgtttatgtgttcattcttaagaaggaatcacttccttccttccagcagaggttgactcccaagcttggttccgtgtgggtttcaaagatcctcattcatcttccttaataagatgtgatgcacatagtatttttctgtcatcaattctaattcaaaaacatcaaaccaaagcctcgctgatgtgccagcctctcacttgatgaacagaacgtgcgttctggtaaagccaggtgtgcgcgcctggattccgttcctgtactatgtgcagcagagttggcaacacgaaaccgtccgaaggaaaagaaaagccatgttgaggtcccttttccctgagatgaaccatttgatgaagccagaatgaggaataaagccgtgattcacaagcctaaaagacgagagttcagcgttgcagctgggcccactctcccccactcgatgggttccaacttgcagatgtctgcgctattccaggccacagccaagccccagcgtgggcagcagtgcccagtgcagcaactgtgtcgagctggaaacggtggacagctttcatcccatgtgggaaccagagggggtgtgtgtttgggggatgaattcctgcacattcatgcaactccctctccaggccttactgggcaggagcttgggtgagwaggcaaggccaggagggagaagtaattttatggtacattttgtgtctttcctttatttcataccacaattcttttttttttccaaatttgggttgtaagaatgaagcagaagaaatcgatggtgcctcttctttatgaaatagctgaaggtacaatgataattaccttcctagcagcagctgaatgaaaagctcacaattacagcaaaggaaggccctggctgtgcaggataaaactatgataattacatctgtcatatttgtacttagtcctcattacatttcagggaaggcatccagtggtaaataatgtgcaatctttgcttttaaatcagaggtcatgaaagtcaatgggaattctgttttccctcgtaggttgtctgagagagaaacccatgagctacatttaaaacagcctgattattactgaggacaccaagttgaggaatggtgttcacgcaacagcccactcaaacacagcacacaagctttattaccaggacaactctgaaactcccagtgacatgtaaaaactagcttaattcttcatttcactgtctattaagggagaaaaaaacatcatttaaagttttaattcagaatgcatttaactatgtagggacagagtggcttttcagaaaaagaagagaggttggatgttctgactagcataagaaattggccaaatatgggaatcacttcagttatttacaaccaaaattctgtgtataataatggtttatattcagtattttacttaagtaaatctcaactcctaagaatacgatataaaaatatttcaagttcaaaagtcaatctgctgactgggtgcagtggctcatgcctgtaatcccagcactttgggaggccaaggcaggcgaatcacttgagttcagaagtttaagaccagcctggccaatatggtgaaaccccatctctactaaaaacacagaaactagccaggcatggtggtgcatacctgtaatcccagctgaggcagaagaaacatttgaacccaggagggagaggttgcagtgagccgagatcatgccaccacactccagcctggggtaaagaacaagaccctgtctcaaaaaaaacaagtcaatctcccattgattactgaagctacaatttcccaataaattcccatattaagmcttagtatttggaaaagagacttgagaagtcaaatggtggttttcaagaaagcgtttcatgcaatttgctttaaatgttaggaaaggcaggtggagatgtgggcaggtggagatgtgggcaggtggagaggtaggcaggtggagaggtgggcaggtggagaggtgggcaggtggagaggtgggcaggtggagaggtgggcaggtggagaggtaggcaggtggagatgtgggcaggtggagaggtgggcaggtggagaggtgggcaggtggagaggggcaggtggagatgtgggcaggtggagaggtaggcaggtggagaggtgggcaggtggagaggtgggcaggtggagaggtgggcaggtggagaggtgggcaggtggagaggtgggcaggtggagaggtaggcaggtggagatgtgggcaggtggagaggtgggcaggtggagaggtgggcaggtggagaggggcaggtggagaggtgggcaggtggagaggtgggcaggtggagaggtgggcaggtggagaggtgggcaggtagaaatacctacagatgaggtgtgtgcttattctctgtgcaagatttcagagtaaagacgtgacacccatgcccttccccaaagctggccagatcctcttaagatgttaaggtcacagctgccagaggccggggctggtttgggagcagaaactggcgttcccttcacctgccccgcagtgggtgcctctgccaccatggaggctgttgaggactgcaggacacagtccagtggtcctgacatgctgagtgcttcatttctaaaatgagctttgtttggaatattggggaaattgtggctaagtttttcatgcagattagggtttctaaagatacttgtttagtaattatcctctgatagcataaggcacatcactaggccatctttacactgtgtattcagagagacagaggaacacacctcactagcatcctagttcatatgacatcttcataagaatcagtcaaccaagggataacagagtcaacacagacaaatgggctttatttttattttaaaaaagtaagccaggcgcagtggcttatgcctgtaatcccagcactttgggaggccaaagcaggcagattgcctgaggtcaggagttcgagaccagcctggccaatatggtgaaaccccatctctactaaaaatacaaaaagtagctgggtgtggtggcacacgcctgtaatcccagccactctggaggctgaggcaggagaatcgcttgaacccaggaggcagaggttgcagtgagccaagattgcaccactgcactccagcatggatgacagggtgaggctccatctcaaaaaaaaaaaaaagtaaaaacagaattatactgttaattgtacttgccttctggctgttgattttcatgaagtcacttggagtgagtcacactggattctctgtggtaccggcctctctaggcgggatgtgttgctgcagaagcccctgtctggggagaaagcgctcagaaatgaccgcacctcgccattcagatgcttggccccgcacaccactggaggacacagcagctctgtgcttgaggaagcagcatccttccttccttctgtggttcactgaggacagcatggaygcgtgttcacgggccgcagaccgcctgacagcttggcgttcacctaataaatttacaggttttcacggacagtttcgggatgaccaacaccaggacacacacatacacacagacgagtctgcacatgcacgtgcactggaatccagagctaaaggacacttagaaaccgcatcatccaagctcctcactccctgagctcacccaccatacagatatggagactgaggcccggagacgcygacgtccaagctcctcactccctgagctcacccaccatacagatatggagactgaggcccggagacgccgacgtccaagctcctcactccctgagctcacccaccatacagatacggagactgaggccyggagatatgacaggccttttcccacagccgggcagtttgtgtcgggaacataacagtcatacaaataaaaagtatgttgcaatgaaatggaaagtcatgagtaggaggcgaagggtaagaatgaagaccggaggaagccagagtaggtgccgtgtgatcgctgggtggggaagacagagggacacacacccaccatgtccggttgtcacgcagatgccctcattggaaaaagcaatgttagtagaaactcacttgatttcctccacagccacttatcctgcccgaaaaccttaaatgtagtaaaatctctgtgtggccagttaagtatttgcttgacttttcctcgaagcctgcgtgagaccacaaggaggctgcctgtggcctttgcagttgctgcttccacaaaatccttctgcccagaataattttctgttcaacagaatgtgcctggaattaaatgaatgtaattgtctcctgaattattgtgaaaccgatgacacatgtcaccactcggatcatcatgctgttcccgccttcccagtggcccccacaggacggcaggtgggcgggagggaggtgaggccggtccccactcagtctgcacagcccacacttcctgttcagccatccccctcccagcaccctgactgtatttgctcctgtcttaggcattggagcaggtgatgggtgtgtggactttaggacaccttaacaactcagacctaaatcaacagtcaccttatcgaccctcctgcaaccctgtccagcattttactttcaatcacctatttctcattttgaaagcaactaaatgtgctagtttgaacatgcttacaattttaaaatgtgttgctgtagaaattgctctgggcaaaaaaaaaaacacacacacacacatttcagaaggaggcggggctttccttttcatgcattactatttgcaaggaagagacaggggtctctgtaaatagctgtcacccccaacaaatgcatatttcaaaaaatcaaaacttatttctgctaagcatttttctactgaaacattctaattggggctttcagcgacggtaacataattttacctgtattgtgtgtgttgtggcgaatttcaaaacgaggtccagttttaattacgaatcactaaatcagatgcacaaaaagcttttctccctgcttccccccagcccccggctagcgtcaccgtgttgttctgtgagaataacttacatctgttcctttatgctcgcccctcttttatggtgaacataattataaggtgcatttggtgccttcttttgtgctgacagccatcatctctggggctggtgacggctgcacggggactcactggctcgctgttaaagaaaacgtgccccacgtcagcttcccaaatgcagcagcacttaaggtagcaccggggccaccactgatgtcctcgtgcgttggcttaaaattgcatagggttaaaatttgctcatttttcactgtgttgagaaatgttttcttaataattaccttgaaatctgaacattgtaaatctcgaatcaaaccctgatagcaaaagagtccattttagtcctagacacaatagaagaaaggactgtgcgtcagatgcacaagcggctgcctccccaaggtgaggttcccccagcgcagcatccggctctccgggggtcggtctctgcagatgcttctgggaggtgtggggaggagctggtgagccctggggatgatagtgatgtcctggtatcttcgtgtcctttgcagggtggcctgggcttgccctctggaagacagaaccacctccatctgacgcccctcagcaatgtgctcaaatctcgcttgcctctcaaggctttgtcctcaagttcttttttctgtgcttaatcttcgaaataaatgtaataattatggtcttctaagccaaccttctcccattggagctagcaagatgcgttcggacaaactggggagccggagagcccacacctgccctctttgtttctggtccctgcctggtggggaaacagaacaggaggccactcccagcaaggcccttccgccccggctctgccacagacccaggcccaggctgaccggctgtgcctgtgccccctttccaggatacacaaaaacaagcccccacacacaacgagttaactccagcagggaagcagcaggtagcgctagttcgttctcccaggacgctggcaagtttgtccatgaggcctggaggaaccctgttcacactctccattgagagcttggagctcagcctcaccccagccagccctgtggctctagcaagaggctcgttctcctgaacacagggcagcctgggtgggctccgtggccaggaagctctggggtcacttgcaggctggaaagctcatccatgtcatggggtcgcacctgctgagtgggctaacaacggctgcctgccctccttgggctactggtcttcatttctgttgatgctgctcttagaacctcaacctcaggtataaggaaagcatttcagacgcagtggttcaggctcaaggctcgggacagctgggtccctacctgtgccgggtgctcgtttgaatcaacaaagggcaagttgtgtgttgctcagttcaggagatgccacctttccctcttcctgaacccaggctctgcttcctggcttcctaacctccaggctccctaacctctgggctccctaacttccgggcttcctaaccaccaggcttcctaacctcctggcttcctaacctccgggcttcctaaacaccaggcttcctaacctcctggcttcctaacctccaggcttcctaacctcctggcttcctaaccttctggcttcctaacctccgggcttcctaaacaccaggcttcctaacctcctggcttcctaacccccaggtttcctaacctccgggtttcttaacgtcctggcttcctaacctccgggtttcctaaccttctggcttcctaacctccaggcttcctaacctccaggcttcctaatctcctggctaaccgctgtggtgtggtcttgtctctgcagatggatcacgacccgaggaaccccgcgtacatcgccacccagggaccgctgcccgccaccgtggctgacttttggcaggtgaacatttttaaattaaaatctctctttctgaaaagaagatctcaataactgggtcacgaatcatgtcttgaatctgattaggccaatcaaacttcttacaaatgctcatcaaatgttacttatatcagaatttcagtctgttcatattttttattatcaatcttttgttttccaaaacttgagtatgaaaaaattccctttgagagatttaatgctttcaagatcattacttttaagccactttacatttgcattttataaaacagcgaggataaagttagtaagtcattccatgttattgaaatgtgcctgttgtccatggcgttgttatgatggcggtcacagcaggacccaagtacatcctctgtcatcctctcctggagtcctgtagggcatctgaaggccaggccgtgcttctctactcgacgcaagcccaggtcacacagatgaaggcacagacgtgagggctgacgtgaatgtcaaacrtcagcaaatagagcaacatgcagagggcaggtggggtcttccttctccagctgcccccgggtctcccctcaccagccacgtgacaaagctgaataggaatgggttctggaacctggaacgtggccgtgagttaccgcaggagcacaggcaccggccgcgtgtcgggcacaccagccaaccccgagcctggcagagaggagctcctaaggagagtcgagctggggacgaaggtgggaagcgacgcgtcacccatgcggcagaatccaggcagggaggtgcctgtcgcagcagtgacgctgggatcaggctgcagcctcctggcgatccacagcccgggcctcctggygatccaaagcccgggcctcctggcgatccacagcccgggcgcctgtgcagcactggggtgagacatttcctgatgtcgctgtgcaccggagttggtaaattcacttctgccccaggctcttcctattccctttacttccctttcctggctttcccgtcagcctcgcgtgactccgattacaggaaggggagcctcctctctctgcccttgagaacagtctctgcagggctttccagaaaagtctggaacagatccgggtttccgagggcctccgagcacccttgcatggtgagcatttgaatcctcaggtgccatcatcccattttatgggcaaggcacatgggtattggagagatggcatcacttacccaggacagctcggatgacgccaggatctgaaacacatcggtatgacctcctgccctttgtgtctgcctgtgtcttcacactattgaaaataaataaataaaactaaactgcatctctgtgtgacgttgttgaagcttgtaatcccggcatggcacggcgaacctgtggcacttggatggttttgggggcacttgggctccctacttgtcacagctggggagtcgcccagcccggtgagaacatgcctttcccagagaagatggcaccctggggcccatcgtctcgggagtttcgtggtaggaaggtctttgcatggcacacacctgccttcctgaaacatggacccatccgtcccagcgctgcccttagaatggagccccagggcccttccagggatgccccctgctgtgcacgctcaccccggcttctcagggaaaaggacagagtgttcagaattggagggcgggcagagaatacccacggagtcctaataccactggagttttcatccacctcaacccattacccaaaatgtgcttatttgtgtggcatggggtgcccccaaatatgtgttctttcatttttatgagcccttgggcccccacagcccaacatcaacttcatctcctcacctgtgcaagacttctctgtccagcaaagccacagggtctggagggcatccacactcaatgaccacgatgatgcccacatccaccctctgttcagcaggtgccacatccacccaccatcctgtgtgaaggctctcggtgtccacgcgcaacaaccatgatgatgcccacatccaccctcggttcagtaggtgccacatccaccctccgtcctgtgtgaaggctctcggtgtccatgctcaacgaccacgatgatgcccacatccactctcagttcagcaggtgccacatccaccctccatcctgcgtgaagcctctcggcatccacactcaacgaccacgatgatgcccacatccaccctccattcagcaggtgccacatccaccctccgtcctgcgtgaagcctctcggcatccacactcaatgaccacgatgatgcccacatccaccctccattcagcaggtgccacatccaccctccgtcctgcgtgaagcctcttggcatccacactcaacgaccacgatgatgcccacatccaccctccattcagcaggtgccacatccaccctccgtcctgtgtgaaggctctcggcatccacgctcaacgaccacaatgatgcccacatccaccctcggttcagtaggtgccacgtccaccctccgtcatgtgtgaagcctctcggcatccatgctcaacgaccacgatgatgcccacatccaccctcggttcagcaggtgccacatccaccctctgtcctgtgtgaaggctcttggcgtccatgctcaacgaccacgatgatgcccacatccacccttggttcagcaggtgccacatccaccctccgtcctgtgtgaagcctctcggcgtccacactcaacgaccacgatgatgcccacatccaacctccgttcagcaggtgccacatccaccctccatcctgtgtgaaggctctcggtgtccacactcaacgaccacgatgatgcccacatccaacctccgttcagcaggtgctgggwcctacatgaagctctcacatgctgacctgtagtctctgtggtccgtgagactcagaggctcatagcgtgcccagattcctgtggctagtgaatagaaggcgtgaaccatttttcttactgtttattatggatagttgcaattgttggaggcaattcatttgatcagtgtttacatcttatgggctattttagagtgataatcaaggagcatatattcttgaaattgaaatgatgcatctctgtatgaaataagtagagacaaattttaaagcaaggtgaaatgcaagataattttgagacacatctcggacagcaggtatcargtggttccaggaaaccccagcgtccctcaacctggtcacagcttttctaagacaagagctcatggccagtagcctcagccctcccaggatgttctcgagcatgccagccgagcagagcctctgagaaattgtgaactaaagaaactcgcttcattttgctccctgcagacgtccctgaccacgacgtcattgcttccacgtcatccttcaacctggggatccctctgtgcagaacacaggagctgcccaccatcgatgccataaatccacacagagcaggatggaggagagttgcttcctagcacagtcacatttgcctgggaggcctctaaaccgtgtgttttagaatgtcagcatctctcaggcgttgttcttcattgaatacttaccagtaagccccaagattgacattcttaaaaattcaaagttagggttctctttgccctctctggcttagcagaacgcaggcagaggaagaacacctgtctttaaaacctcccacggaaggcagaacttttccaaacccacggtaacgtgtatttttaaggacaaaggtggatttgaaatgcgaagttggtgatgacgaagtcaacaggctgagttggagtgaccgtctcctcctgcatccccattctggaccattctcagatgctgaccaaggatcgggacacagactgaaggttatggatcatcccaaagcaccttccttttatctccggctgttgatgctgatctgaagctcctccttggggcaggtccacaggtgtttcttctctgtcggtaatcagcaaattccaggaagaaagtgtgagcgtgagaaaggccgtgatgggaaagatggccgtgtctgccccaggcccgtgcactccttgggggattcgaagtgtccccctcatctctgcctccctgtcacacagcttttccccaccgtggatttatgtcagggtccaaatttccctcctcttctaaggatgtcagtcattggactgagagctcatcctagcctgtgtgacctcaccttaacttgaccacatatgcaaagaccctatttccaaataagaccacattcatgggttccaggtggacatggatttgggggtacatgattctacccagtacaatggctaagaagaaaaaagaccttttccaagcagctaattggcacccacatgacatggtgatgggtcaggagtccgtttggaggtcactgggctgctgggaggcagaggagccaggagggccccaagttcctcagcaagaaatgctgtacaggggcccatgggtccagaaggggggagcctggaagacgggttcaggggaagtcccctcggtgagcatggggcatcgaggtcactccatgctcaccagcctctcccccagcatggcaccgcgaggccccatcagctccccgtcccgcagggcccacagcacctctgtccgtgctgcgtccctgagcagagcccagaacgtgcacgaaaatccacggagggtcaccactcactgcacacatggtgctttcctgcagtgaaccagctctatatggacactggatgcatttcaagaatttgatttccaaaatttgacttacatcaagaaattcctaaaaataaattcattacctaaaggaagatgtaccccaaattaattccttgtctgtgagtgctctccaaatcattcggctgaattcctggtccttactccagctcagaggggtctgtggaagtctgagttacagttcagaaatcagtgttactagtaagtagtaaactggcctagaaataaaacatccctcaaggaaagaatacccattttggggtgagggtgtcattttgtcatataaactttttttttaaagtgtggaacaattttaaaggaagaatggaaagaaaacttaagtatgggccaatcttgtgctacattatttgaagtcatatcaagatcttaggaagaaacatgtccaccgtcctctctgctggtcattctgggatgatatctggaatatgatgttccttctgcaatcataaattcaaaaagggtgctgacattcaaaacacaacagaaaaagaagccagagagtttggtggaaacagccggggtggtgagagttttgaaaatcactgcaggaggcagaaaaagccgtcctcggcatagagcaccacccacaagctccctcttcatccacgccgccgctgtcagcccagacgtcacaaggaaacttggcctcggctggcgtctggacttggtggtgcgtaaaactttctttttaaaatcctaattttctttttaaatcctaaactttctttttaaaatcctaatttaaatctgaagaagggttaagaatattctaataaattttaaattaggaacacgagtttggctgtgaggttttactgttttgttcaatgcttctaaataaggagtcttaacacctcatacccatccgttgacacccccaggcgttgagctctggttgctgtcaacaagccgcttagggaggaggctgaatatcaggaaggaaracgagaggaggaggcaggtctccatggtccactcctggatccctgcggctttgggtacctgtcagatagcctttctctagaaagcctttctctagaaagtgtattttaatctgcaaagacgcctcccacctgccaaatggggccaccttgagtgaaagacacgcacccattggaggggacattcgagtccagtgggcataaggaaagggggctgggggaagaaaggaagtcccatttactgagctcttcaatgccaggccctgggcaggcacttcccatatgggatctcatttggccgagccattgaccctgcgatgaagccatcgtgagcctcccrtcattccacctcatggggtccccggaggcgtcagattcatagaagcctagtrtgaatctagggggtagtagccaggggctcagggaggggacagtgcagaggggcttgatggtgacagggcttccatttgggaagatgagaatgctctgaagagcgtggtgacggtgacggttgtagaacggtgggaaggcccttactgccgctgcactgtgcacttacaaacggtawattatatgttaggtatcttttactacaattaaaatagagatatacagagtgagcccaattctacccaggatgaagctgtggcccagagagccataaggacccacccagatccacacagctggtgggaggcaaagcccattctagacccagacatgtgtagtgccagggtgtctcttcagcatacacactcctcacagataaagaaggcacagtgacatgaagacgtctctataaacagaaaagagagatccggcagcagtgacctcggcatttccagagtaggtgttgtttacaaaaatacacgtgtgcagagtctcaaggcgcagaatatgtgaaagtcaaagtcctcagagacaggagataaagtgacgctttctccaggtgccgagacytccccacggggaagcaaggtctgcaccttcccggggacgtggccccacagtgcgtccccagcccagtcatgtcctggtgcacagggcagctgtcgcagagaagcccccgcaggcaggactgtagctggatcacagagaagcccctgcgggcaggactgtagctgtaagattaggactgccggggaggcaggggaggggccgcgggcatcgatattccatcacggaccacctccctactgcctgcacctgctgcgccaccttctaccacaccctgtgctacgcggctcgagtcaaccgaagggagttggccacccgccatcccccctttcctatttttagaaagagctgcagaattatgtgctcttcttccagagagagcttctgtgtgtcaccaccaaacactggctgtgcccaggagatacacaacagctgtttctaaaccagaaatgtaggcagcatagtctgtcaccatcaggtgcggagtggatgtctgcagatgtgacatggaaagccagggccctggagcccaggcacagggacagccaccacgggagcccaggcacggggacagccaccgcgggagcccaggcacggggacagccaccgcgggagcccaggcacggggacagccaccgcgggagcccaggcacggggacagccaccgcgggagcccaggcacggggacagccaccttgggaacccaggcatggggagagccaccacgggagcccaggcatggggacagccaccgtgggaactggctccctgtatgggaggctcagccaagaggacaactccaaagttcagccttgcctctcctgtctgatgaacaggctgcctttcaggacagagtcagacacgaaacagctctcctggcccccagagagagcacaaagcgctcgctgaagtcagcaggtgtcccactggcatcggatgtgtgttgactcttattgcacatcaacattttaccaagaaaaaggtgcactttcaatttctagtttctgctttctaaaagtattctgtgatgaagcctcagctggggggatatgttttctcatttccaaattgataggcttgatgtaaatacagctttttattatttggcatctgtagatcatagttcttactatggttaagaaaaaatcctgaacttggaactgtggaagacccaaagaatttaacggtgtttccttccaactgcctgccagccaccggtgacaaggccgaggtgcaggagaatgacagttgacagctgactgtcaccgtgcagggccgcccaccacccggcaccagtggctcgtctgcctgtctgcctgtttgtctgcctgtctgtctgcctgtctcgctgtctgcctgtctgcctgygtgtcttgtctctgtctgcctgcctgtcttgtctctatctgcctgtcttgtctgtctgcctgcctgtctgcctgtctgcctgcctgtgtatctgcctgtctgctgtgtcagctactgcactagtccaggcaggggtgggtgggaagatggcaggcctggattccacaccatgcactgtctctgggcagcttccttgatcagcccaggatgaccactgcaggcatcaccatcagcaccaccagcaaccaaacctcagagcatccagagatgaccctggcctggccccggtggaggggatggtcctacaccacctaatttttaaaaacatttaaatcctccaaagatggcatccgctcagcccgagctggttcacggcccccagctactcacaactgttttaatgttccctcggcatgtgggaggcagggccctgagtgtcccggacagaccgagtgtccaacagcggggaccctgagcatccaggacagacccagcatccagcagcggggcccctgagtctccaggacaggcccagtgtccagtagcagggggccctgagtctccaggacagacgtggcgtccagcagcgggggccctgagtctccaggacatacccagcatccagcagcaggggccctgagtctccaggacagacccggtgtctggcagcctctcctttctcgtcagatgtgtccagcctgggaccacggtgtctgctctgggtccttggttaccttaagtggtctggctccaaaagcatgagaatgtcccccagtccctgcagctccctagtgtgggtgaagactcagcttgctcatcatcctgttccaccccctggacagtgactggtgcgagagggaaccgtctgtggatctcactgactctggagtgaagggagagtcaggaggttagcggggggaaatgacttcagaggctgctacgtcacagatgggttgattttaaggcacgttacttgattaaagggaagcatgagagttgtgttaattcttaggaattaacatgagagttgtgttcattcttaatttcttaggaaaaacttgatttttcatttccatgattgataagtactttaaccacatgcctgagactttccaggacattgttatatttcaaaggtttggtcttgctggatttttttctattcataaattcacgaacctttaaaggtgaaagaaactgtttctcacgttgccttatctaaattttgggtttgaaacctatgacctcaaagcttgtccatggttctgcctgggacagtgcaaagatggtcggtcagtctctcgccgcacacatgcggaatttaaaatgggactcaagtagaaaggacaggtccggctttcctttctgactgattcttactgctccagctgagaacagcaggctctgctgctcctgtgtgtgattggttcccagcctccggccagctcctcccatccccactcctcctcccctcttcctcttcctcttcctctcttgcttcacaactggatctgatgcatttatgtcaggtcctgatcttgaaaaggaaaggccgcccagtgcagcagctccccgcaaggagaccaggcgcatatttaaccgggaacgtgagcacaggcagaggccacagggagtctcagtgacgcctgtgccaggtgacttcctgtgcgggtccaatgcctgatcacaaaggcacccacggtggtcacacaaaggccgggtggagaggaagtccagtgtgtgagtgcattcccaccgtgggaacccctatgcggcaggatggccacaccaagccacacggggtctgcttgcacacaagcaggctgagtccttcccggagaacacagacccgactttggtggagtggcaagtcctcattctgaggcttccccttcctcctgggcagcaatactgctggtgttctgaggcttccccttcctcctgggcggcaatactgctggtggaaaagtcccagaggttgctgcagctgctcctcagccctgggatggggctacaaggcagcacaggcgtcgatctgatagcggcacaggggggttcctcccgctgccccctcatcagcctttccatcagcactgctgacgtgtgtgtgggctacgtcacctcatcgtgtcatccctaaatgaatcccacactgagatatttgtttactaaaaaaaagccaggtaggtgcaccatgagctggtcatggacggcatcacgaaggttttgtcaccctgcgttgggttatattaccgtgtccaaatgtgcgtgctgtggcctggagcctgtgactctctcggaaccagagccgcaaagcctgaagcttcatttcttaggactgtcctctgggcagggtgagagcagagctgaaggtttcccctgcaaaagatgtcacacacactatttcttcctctttaatctgtctcagaccacacagtttaacttccaggcatcggtgagctcctaaggagtgaaatacgagtgttttcccattaactgactcctcatccttttaaatttagctgcatcttctttataagtctaaacctctgttcagcccacgagaggacgctcacaacagaaatgagcagaaatgagctgtgcagcagaattgcgtgggccccgcacctgctctggaggaaatgcatcttcatggcaaccgcttcagcgggatgcagttaccatgcttgtttttttaaaaactgaacacttgtctgtacatttaagcaagtcctggaggacttctgccatgcaagcctttgataacattttctttcggttatctttttttttacataaatatccaaacggcctcttagaaatgtgaattgttttcaatgaagcatctgttagatgccatggagggtagaaaaggtaactggactaggatggagtctttaaagagatgatagtctggtagaggaaagacatacgggctaaagacaagactaacacaggcaggaagggactcatcacaaaagatctaagtagaaggaggagaagctttcctcctgaaggggcccagggatgttttgtagagaaaatggcctggcgtttcactatttcagttttttgttttgtttttcagagatgggatctcactatgttgcccaggctggtcctgaactcctgggctcaaatgatcctcccacccacctcagcctcccaactagctgggactacaggttcacaccaccacatccagctccagtgtttcactatttcagattgatcatcttcccttaaatcaggtctctgtggggcttcagragagcttattttaagartgtgtgtgtgtgtgtgtgtgtgtgtgtgtgtgtgtgtgtgtgtgtgkgtgtttgagacagagtctcgctctgtcacccaggctggcgtgcagtggcatgatctcagctcactgcaacctctgccttccaggcacaagcagttctcctgcctcagcctcctgagtagctgggattacagcacccaccaacacacctggctaattttctatttttagtaaagacagggttttgccatgttggcgaggctagtctcgaactcctgacctcaagtgattcgcctgccttggcctcccaaagtgctgggattagaggtgcgagcccctgtgcccggtcgagttgtttttaattgtaaatgtttaaggtgtacagcctgatgttctgacacacgcagacatcgtgaatgatgaccacagtcaagctaatgaatacacgtctcctcgcgtagttaccgtttctttgtgtgtggtgaagcacctgaagcctactctcctggcaaatctctgtgcccaacactcttattaactacagtcaccatgctgaatgccaggtctccagaattcagctgtcctctactggaagttactacctttggatcaattgctccccattccaccctcagccccaggccctggcagccccccttctactctgtccctgagttcgtcctttttaggtgccacatgtgagtgagatcatggggtgcctgtccttctgtgtccggcttatttcaatttaacgtcgtgtcctccaggttcatccatgttgtcaaaaatgacaggagttcattctttcttaaggctgaataatatttcattgtgtatataccacattttctttagccattatccattgacagacatgtgggttgttccaaatcttgtttattgtgaatagttctgcaataaacaaaggggtgctgatgtcccttccacacactgattttatttcctttgggtctatacccagaagtgggattgctggatcacacagtggttctgtgtaattgtttgaggctctccatactggttttattgttttttttgttttgttttttttttttgaggtggagttttgctcttgttacccaggctggagtgcaatgacacggtctcggctcactgcaacctccgcctcctaggttcaagaggttctcctgcctcagcctcctgagtagctgggattacaggtgcatgccacgatacccggctaatttttgtatttttagtagagatggtgtttcaccatgttggtcaggctggtctcgaactcctgacctcgtgatccacctgcctcggcctcccaaagtgctgggattacaggtgtgagccaccgtgcctggccctccatactgttttctgtaaaggctgccctcactcacattgctaccgtatagtgtgtaaggttccgtctcttccacatcctctccaacacttgccatccccctcttttcggtggcagccatcccaacaggcacgaggtgccagtgcgctgtggttttgatttgcatttccctgatggctgatgacattcagccccttttcacatacgtgcgggccatttgtctgtcttctttggagaaatgtgtgctcagatcccttgcccatttttagttgggtcatttgtttttttgtttgtttgctaattaaatacttagcactcaaaaaggacctagagtgaagaggccctgtgttcctctccatcggtgttgataggaagcgtaggcggggtggccattgttccacgcctgtgggtgatttgatgggtgaagaagagagtgaggttgcagcggatgcatctcttgctagggctgacatcacaaggtgctgcaaactcgttgttttaaaacaacaggagggcatcccctcgcagttctggagcctggtagtctgagatccaggtgtgagcagggccacgctctccgaagcctgtgggggaagatcctcacggcctctgcagtgtcccgtggccgcctgccatgaggggtgtggcgtgggtggccacaacactccatctctgcctgtctgcgcgtggccgctctccgtgtctgtgccttctcgaggtgtctccctcttcttctaaagacacagtcacgttggattgggacccaccctcagctcagttgcatctgcaaagatcctgtttccaaataaggccacattcatagataccagggattaggacgtcaatataagctgtggggaggacagcgttgaacctgtaacaaacaacaatatggtttttaaatctacagtcagtaaacttactcagttgggtcaaataacagccgaagtctgcacttcttgttccttgggtcactgtccgaatcactgaatttctccacttgctgctgctgaacagctgtcaggagacctcacagcaagctgctgtgtccctgccgggcgcgtcgagatggctcaggttcacagagcctggcagcaggctttaacccctgtgtttggtggtctctgagaaccactgggctgaccacttccattccttctggaatcataaacagcaaagcgcaacattgctcccctccccaccccaggcccacagagctggcacagctagagccttcaagggggatgctgaggcctggggacgctgcactggagaagaagtatgtaaaactggggagtatcagttttcctccaaagcgtggtgccagccgttcacactcgggatccagcacttgcggctcattttcagtccatgttggtgactttggttcgatccagggatggtggtgcaagtgctgggatgtgcaggggctcaggtgtgcaggtgctggtgtgtgcaggtgctggtgtgtccaggtgctcgggtgtgcaggtgctggagtgtgcaggggctcgggtgtgcaggtgctggggtgtgcagggggtgtgcaggtgctggggtgtgcaggtgctggggtgtgcaggggctcgggtgtgcaggtgctggggtgtgcaggggctgcggtgtgcaggtgctggggtgtgcaggggctggggtgtgcaggggctcgggtgtgcaggtgccacggtgtggaggtgctggggtgtgcaggtgctggggtgtgcaggggctggggtgtgcaggggctcgggtgtgcaggtgctggggtgtgcaggtgctggggtgtgcaggtgctggggtgtgcaggggctcgggtgtgcaggtgctggggtgtgcaggtgctggggtgtgcaggtgctggtgtgtccaggtgctggagtgtggaggggctcgggtgtccaggtgctggggtgtgcaggggctcgggtgttcaggggctcgggtgtgcaggtgctggggtgtgcaggggctggggtgtgcaggggctggggtgtgcaggtgctggggtgtgcaggggctcggatgtgcaggtgctcagatgtgcaggggctcggctcgggtgtgcaggtgctggggtgtgcaggtgccacggtgtgcaggtgctgtggtgtgcaggtgctgcggtgtgcaggtgctggggtgtgcaggtgctggggtgtgcaggtactcggctgtgcaggtggccatgggggccgtgttctcttacccttcaccaaacaggaagtgccagtaatggtcatttctggaattcaggcatacagttttgtaaactgcgcattccaatgaactgcattaagattaaataaggatcctgggtcattatttacttcctgaaagagacagttttagatttctcaaagatttgtgacacaaaccaatgttaacttgattaagtctgaaaaatcctgtatccaaatgaggtcacattcacaggtgccaggggttagcacttccgtatttcacctgtcagcaaagaccaagtcaatgagaaagaaaatagtgaaacttctccccgattagaaattgaaccttactcgactgggatttttactgattctgcattcataccaaaatccaaattaactttttgcgatgtattctgaggttatctggtcaggcgcgctgttgaaggctggaaacagatggagaaatgccatagttttcctcctcgattgagttgctttgtaccgattcaaaggaacacaagataatgtaatcagttccatgaacagcttgtaatattggtacccaattgggctgcctatttgtttgatttagtaaattcccctctctgcttttatacacagtgacctaaaaagaaatattattccccagagcgcctttgggattgcttgtttaaattaagtttcatttggatttaatcttaaccaaatcttcagagagccgggaaggcgccccataatgaagggcggacgcgagagccaatgagtgcggcttccaggccgtccgggtccccccagtcgacggggctctgtaatgtcacacttgggtggcacggagccgagtgccggatgattagtttatggtctagatcattgtatttttattacactcataaaatctgtgtttctcctcattttcgtaatggcttccatgagcttctccaccttctgaaggcacattaaattgttatgtgatggaagaaccgatttggaggagcaggtttgaaagcctgaaaagcctggcgtaagaaacatgttttgaattctcatcttgttgtcggatgggcactaaggaaagagaaagtgcacaaatttgagcataattcttatttatttgtgggcgttttgtaaatacttcagttggttccattggcttccgatgtaaatgttacacagtgaggtgccttgaggatattgactatttcagccccgtgagaacataaatcaatattaaaaaaggaaaatgtcgtgtttgtgtctgatttttaaaatataaaygtggaattcagtaacatgcgctacgatgacagcattttatatttgggatatgagggtttttaaaataacaaggtcttaattggatttttgtgtctgtttttaaaagaaatagaaactgtcttggataccaaatttacatctaaatgcagttgcttataaacatttctgccaagttaatgtaacccattgcagaaaaagcagacccctcttcactctataatttcatatgctaataaaaatctacaaatgccacatcagtgtgccccacaggattagtggttttgggtagttaggctgtaaatgttaagatgtrggtttacagccacaagtagccagttgtgtttgcaaagaaacgaggtcagaggactttgtgtctttgtaatttctgtgggtttaaatgtgcttttgtttattgtgtttcaatgtggctaataggaattagtaaatcaatttggtatttgctttaatctgaatagtgttgccatatttcggtataaacaaatgaaattgcagcagtgcagtactgctttccgtgaagtactttgaaaagaagcctttcggaggctgcttctgacaggacagcagcttcacgaagcaaaacgtttctctaggtgagcaaaatgatgctagccaccagcaagtgagggtgtcggcaccgcctcgagaagtgctggctgttatgtgtggcgttgtagaaagtttcctttacagatcagaagttggaaaaccacacagctgaacctacacctgaggaagctctaaatggcatgggataaatttgcggggttttttaatatttcgtggaacatgcaaactatgggccagtgcattcagagatgctcaggcagctgcggagtaaacatgtctgatgaaaatgaaataaatgtcctgtgaatggaataaatttggactgtgcttccgagtgcagtaattacacatgtcacgcggtgatgagacagtcacaccgcggccacgggccttctttgtccgcagatggtgtgggagagcggctgcgtggtgatcgtcatgctgacacccctcgcggagaacggcgtccggcagtgctaccactactggccggatgaaggctccaatctctaccacatctatgaggtactccgaccagagccacccaggscaggacccaccagccggacgaggacgggccctgctcctcctcygaatgggattcgttagggccccccagggccgcatgcagggaggctcagcgcaccccatgttcaggggatggaggctgagccacccccgagggccgcatgcagggaggctcagcgcaccccatgttcaggggacggaggctgagtcacccccgagggcygcatgcccgtgtggatggttcacacggctgtgtgctcatgaaccagaccctgggagtgtggtgtggtttttatcttttagatttttctaaatccaaatgataacagagtagaaaaaacattcgcctcacagcgtggtcccggtcccatataacaagcctttaagtggggtccgtttttaagaaaacctggcgcccatccttgatgccagtgcctgagccgtgtggcctccccgtggctctgcttggagtttcgtggctggatcatgtgacctttttatttgaggataacctgctcaccagtttatttatctggctggattttctgcccccatcaagaatgaastaaataaacgkgggtgattaagccagcactagaatgcatgctttgattctgtttggcattaaatgagtgagaatgccaaagctccacagyaggaagcgagttagaggctcaagtgtgaaccttaaaccacacagctgtggccttggggttcctgcagaaaygcttaggcccggaagtgcctgcgctggggttcacatcagcgcgactccgtgagccttttgcttttcctgctctagacccgggtgtgcgcagctgcgayggagtctcacttagagtggaaccactgagcagaacatgtagtcgtgtcgctgcttttgttgaaaagtgtaatttttctctggttcctttttttgagggtttatgtaacatggacatgcaaaagacagaaagtaggatagttttggattgtaaccttttaaaaaattatttgacgctcaagcccctaaataacactaagcacacacacccgcacggagctaacttcagtgcgttaacactgggaaggtgggagggggccgcgaagccgagggaacccacctgcgctgtaaaatgtgccctcttcgcagcgcccccttctctsgtcagacgtggccctgggttcctcagtgcctgaggttcggttcacaatgtccacacctgtctctgtcccctccctccgctcctccctgccaggtgaacctggtctccgagcacatctggtgtgaggacttcctggtgaggagcttctatctgaagaacctgcagaccaacgagacgcgcaccgtgacgcagttccacttcctgagttggtatgaccgaggagtcccttcctcctcaaggtccctcctggacttccgcaggtatgacgcgcggcccgccggcagggcagtgcgcgctgagcgcgcggcacaggggagcgaggcttcggtgctcctgagacgcccctggcgccgagggccgcgtctgtgtcggcgccgcaggggggaggggaagggaagcgagaggcgggaagactccgttaacggcacgtgttaatcgtgagcgattttctagcttcagaggtattaaaatgtgagggggaataggcatcttcgaactgtggaaatagggccattatttttgataaggttcttcagttgacaaagagcctaaagtgtatgtgccacaggatattgatgcataaagctcggatgttcagttggattctcatctggctgcatgggatgaaagaggtagcgagcgcaggcccagataccaccctgcgtgatcttgcagggaagcccggagacacttagcccgtggctgtctgtatttttagggctattttgaaactgaccctctttaaaaaattcagttttttgttcattgctccagtcagccagtcacccaatacgttgtctggtttgagagtgtatttactgaactgttgaagtgaatgctagactctgtcttacaggaagaaattgacaatgaaaaaaaagcagcatttaagaccacagctttgattgtggtaaacagtcggtccgcattggctaggtggtggtgcttagtgaataaaccaccacaaggaaaatgaaattgtcaaaagcatcagtgacgaagctctaaattgtayagaatatgtcttacatttaactgatcagaagtctacctattgaggaaaagagacaaatatccaaacaaggagaataagaasaaaaaatgcatttgaatccaatgccatgccccactatcataaagtgacttgattcttaacagttactcattctcgagtctacagttatgtaactggagggaggttaacgagacaaagattgtcataaagaagcgatttttgaattctctgtggaattcttgaatttgtgtattacagattctgaagcttattatgattcaatttattttgccttttagtctacattgaaaagcaaaatgcagttttttgtaatttgaatcaatagaaatcaatcaagagcctctgcaaggagacacttgaatctggtgtcacagccacaacacacactcagtggcccctgcctgccgtcacctcccctggggacgcagagcgtagatccagagtcctgagtacatcctaaaacaactactgtacacggctccttcctcacccacgctaatttcctggccattatgtacattctgtcaatacggatttatttctaaagacatactatgtagaaatcttacataatttcctgaaatagagtcttcaaaaaacagtcattcctggcaaaatggatgtaactacaaagacggcaattcatcttaacaccccgtctttgcgttcatccagtgtgtttgcacgtatatgcatatgggcacgttgctatgtccatatccatatatggacgggaacatgtacatcaccgaccctcagtgtttatgattcatcaccaagaaaaattggattcccaaatttcccttgctccagggtctgaggagatacagcctaagaaggtttttgttaaattcaaaagctaatgaacccccagacacggttttgaaagccacgtcagagtagaaagcttttcttgcctgccttacctggcaccgcccagcgtttcggccaaggccacctttcatgtgttatctggacagtgggtttgagcgaacacattctcagraagcttcacacttagacaagcattgccggtggctggttttctgtataaaatagccaccccgatttcagcgacaggaaaggtgagaccccttctgaagacaccggccatcttcatgctgcagcgtttcttatctttgaacaatagacgacgcgttctcactctggcctggcgcgttcgccaggcaccgagatgtgtgattaaatatttctggagcccagagggagcgcatttacactttaaagagaaactgctaagagataattagcatcacatgtgagggctttgctttaaaaactctctctctctctctctctctcattattactctctcccttcttgctgtgtgcaatggtgctcactaacgctgctcacggtaaaacggacaaacccttaccttgccagctaattagcggtggccagtgtcatttttgtgatgttgcagctagtaatatgagcccagttgcatagtcacaaaagtgatcattggaaactgtgactgtactgcaggggcgatgtggaaagccccttttctgagcctctaacgacctctgaccttgcttgctggtgctttgcatgacggtgcgctctcgcccggtgacccctgggttggtttgtatcactaatcgttctttctcagtgaattcctgttgtggaagtttctatgataycaacttttcttactgttggagaccttttgctcactgattctttgttctgatggagtcaaatgagacggctgtgtcaccttcctgaataactcgtggtctacatcttgggtcaaccggatgaactcttgtgttcaatatgtcgtggttttcctctctatttgtgatgctttgcgtgtaataatacaactgcatgatcctttgtaaataaagtcctcagccatgccacaccctgtatctacactgcacatgtccttgactgcccgtgggtttttgtaaataggttgagcacaaggtgggggctggtacggatatgaaaattacagcgaaaccttcccaaggccaccaggcacaacatgtcagagaaaatggtatcttccgtatactgtgagatagagacaggagtttcgggagtggggaagcaggttgaggccatcgtagccacaaattcactggctaggagcatttcccagccaagggggttattactgcattttgccaaagcaggagctgaccagctatccatgagccaccgctgtctactgacttcttatgctggcctttcctcaaaccagcacactttcttaaagggtatctggtttggggtttggggtttggtttgttttactgtcccttttttgggtgtacttggtctcatgaggaaaaaatgagcaacccctggtgactggtgggtgtggacccagaagctgagcttagtctctgcgtagagtggaccacgaggtgtgaaacacagcaggaagctggaggagcagaactgaggtcattcccatttgcaagattcagaggctgagccatggccagtaaactcctctgccaaaggcaaaaggcctttcaaagcaaagccactcaccatttggtctgatagttgagcctgcttgattctacacgtgcacacgtgtgcacatacgtgctcacgtcacacacatgcgtgcagtctcatgcacacacacatggtctttactgagctggagggcttcccacccccatgctggggtgcacccctgaggcctggtatccattctgtcatcaggagccctcgatgctttacagcctgagtcaggaatggaaaattgtagaagtagacataagtgggtctgttttccaacctctttattctccagggaccaagaatgttcaaggcactctggcatacaagtgctgttgcctctaaggagttcaccattgccttccccgcctctccccaaagccttcgcaccactgtgtgccccggaaaaacaacaacaaacacctctaacagaaacggtgacacggccctggaggccgttgctggttgtgcctgtgtctgagcccgcccatttttgggcatcagcctcgtgtttcacagaccagagggcagcacagatcaagtgcgtcctggctaggctgtggccgcggcccatctgcaggtgggcacgccgagtccagtccctgcaactgctccttcagctcccgtggtgccctccagactgggcattcacactcccatcagaagggccttgttctggtaactcctcagggaataggaagagaggaggagaaagctctgtggtttgggctccgccgtattcaagcatccctcccctcatgctcactggacactcacctcccctctccttccacagccaccctgcccctcctggcttcaaaggtttgtagcaaagcaccggttgatggaatgtttactttccacggactctttggtgctggataggcaaggctttgcaaagaaacgtgacattttcccattgatggtccatacttccatttttcttaatttgtttcttgtaggagttcacgcagcacattgtagaacactctccttcacacatgctttattccaataacccgaggttccgcctttaattttacttattcagaaatagttcactgacaactttaatggacttcataaacatgtttcattgtttcactgaattaaaaaaaaacacctggatttacacagtgaattttaaatcagtcctctgttttgatttaggggttggttatgaaatcttaaatatatgctcatttctaatttttacaacttctgatctaaactctgcacaatgaagttgtttgtatactcaaagttataagcatggaagggacttgtcttggacttcatagaggtttctccgtaatttagatatccttaccaaaagctgacgggtcacaaatgcccttgaagatgctgtttttagacagtrtggaaataacagttttcaatatgatgtctggactgtaagaaattttgagcataaattgcaaaactcaaaaattttagtgaagaatcaagatgtagtgtaacaaaaggtcaagtcaacataagcagaaacagaaagaggagagcctgcaggggtgggacgggcaggacaggccgggagtccactggttcaaagcctggcacccctccttggaagaagaaagcagtgtagaggtgtaacattggttttaaagctccgattaataacgtcatgttgagaagaagaataaatgtttgatattatgcgtatgatttttattttctccgtcaaaacaagcgattgcaaaatgatttcaaacacacagaccttgcgctttgttttaatagttgttttggataacgcaaagtcttagtacacaacgataatttttatatctctttttatttcagaaaagtaaacaagtgctacaggggccgttcttgtccaataattgttcattgcaggcaagtacaacttttaatggattaagaagttttggctacctcaaaaactaatctatgcaattaaatacagaagcttaactttctaattgcttaataaatataactaactggcacttctaaaggaaaccaaaaatataaacttacttttctatgccatttgggtaaatacaattgggcgttgcttgtattatgtctgtataaactgcacatggcttgctttttttttttttttttttttwaactctgttgcccacgctgcagtgcaatggcgtggtctcgtcaggctcactgcaacctccacctcccgggatcaagcgattgcrcccgccaccacgcccggctaattttttttgtatttttagtagagacgaggtttcaccatttggtcaggctggtctygaactcctgacctcaaatgatccaccgacctcggcctcccaacgtgctgggattacaggcgtgagccaccgcgcgaggcctcacatggaatattttctagcagcccacggtgcagtgtcctgccttctactcacccgtgagcatgtcctgccaccttgcttgttcttaaaccctgtggtcccatgacacagaaacatcgagacaatggtttcagcctgttgcattgtctcaaccaccaggacgtycagcagaggctcagaaccctctgcagatggtgagaaatgcttggggccagttatgtacagggacgaaatctgtcattacaggaggtacagccacctccagtttatcatgtgggttcaggcctctgggtaaaaattcagtgactcatatccctaagtacgttaaaaccacaccagtaagaatagattttacgcaaagaaaactcaacctaatagtactgtctctgctggacttcatacccaactccttttggtgaagaactcatattccatttttctagaactgtcttatagaatgttcttcctgcctggaataaaaaggaaacctgtctccaaagaacaaacaccaaatctgtcaaatccaatcaagaagcatgtgtgttttgtgtgtgcattcctgtctatgagagaggaggatgaaaatagattacggtttgttatccttacagagtagagtagaacatcttttttacccacaaatgtatcaagacaagcaacacttagttggaagatttttgaagtatatcttaaaatattcatgtgaatatatgctgtgcataggagacaagtgagaaaggcactcagcaaccagaatgctcaccgtggccctttgaaatgagcagtgagggttacgtggcggcccaggccgaccgcctctcctccttggtgatgcagtgagggtgtgaggatgtgaacgtgccgttttttaaacatttaccatcccaactgcagcttttttcaaccatttgtttgaggaaacatgttaaagccaaaatgcgctgattctttaccatcaaaagatcacctataggattccagtcatttcttgggatcacagacggcatagaaagcagaaccgaaagtgtgatatctgctgggtaktcacatctttcttgaagtcttgaaatggaaacatttattcgttttccggaaagtcacaattgattttgctaggattataaatgtaaaaggtcctctgtttaaaagccagtcatgggtgtgaacacgagccctatgtacttttaagaaggtctctcaaactcatgcaacccagtgacagcgtctgcacgggggcaggaaatggcttcacacattcctcataagaaaaggatgatcctgaggctactcttcttccagaaaaaaagggaaattttttttcctttgctactgttgaagtattattcaaaacatttttacaactctagcccagatggtaaatattccaattatagctggtgggatgagaaagagatgaaatgagagtgctttttaaagagtaagatttagtaacgactgttatgtcaatttctccttctgagacggaggacctgcgtttagaaggggtggcaggcagcctagggggatgtgcctgaagtgtccctgcgtgcatgagccagcggggcccagccgcccagcgccctcccctctccgctcgggaggttgcccggcaacactagagaaggcaccttgcagatattttcaatacaaatgccatcaactctgacacagtcaaacgcttagttcattttgttctggcaaaatttaccacatctttggccaaagaggggggaacaagcaagagggagtcacatctgagcacagcagctcatcccacaagctacaagctgctcagaggctcgaagcccccaggggcctcccttctcccctcacttggattctcccagcccgcgtccttcctccccctctcacatccgccatcctttcctctcgccggcccccgtaagcaggaaggaaatgractgtcactagctttgttgtgggtcgggcttccgtgtggacggcagcactttcatttctctccttctgttggcagtgacggtgcaggccggagcggcacctacgtcctgatcgacatggttctcaacaagatggccaaaggtgagacacagacactgccgctttgttgcggctcagagctgggatggcgtcgctatggcaacgtagggtgccgtgttcacgggaggccctggaaaaaattcgctgcttgttgtgcctctgctgggccgtaggaaggtggtttgcagcaagcacatctgcttctgaggctggtcgtttgttacctgcctctgcgtgccgagcctgcagtgggtcctttgttacctgcctctgcgtgccgagcatgcactgggtcctttgttacctgccttggtgtgccgagcacacagtgggtccttgacaggtgtttgctgcatacgctgcagcgttaacctcagagccacggagaagccaccctcgggtccttcagtgttgttgcagtgcagaatgccgctccagtatttggtgtaactccactgttgtcaaaacggtattcacactagaggcacactaaaaatatccgttagtaattgccatcaaatgtcaatcaccccctctcaaatgagcctttcagccctctttgtgaatgtccttcttatctagggaatctctgtgcgtgctgtgggaggcgttcctctcagagacggtgtggggagtcttagacttgaggcctgtggtgggagaaggacaggtttggcagagcggcagcatgcgcagacggcgtggggagtcttagacatgaggcgcagggtgcgaggatgggtccagcagcagcgtggaaaagcagatctgtgcgcgggtctggctctgccagcaatgaggtttatcactttggacagagcttttaacctctctgggatccaattttctcctacaaaagcatggggattgagctctggcatttctcaaaaggtggtctccagaatacccaacctctaaggtcatctctttaaataggggccagagagaaggctccccaggcaggtgagcttgagaggaggcacacactgagtctgctccttgggcatcacagggcaggtgtgcatggagaggtcccaaggagtccagggcagagagatgtgtccagcttcccttcagttggcgcctccgacacttacttgagaagagtctgcattagccttgcgatacccgttagcgtcccatggaaggtgggaggcaccgaggtggtagcatcctacggtctctttcccagctgtgaataaacaattccctttgtctcaacacacacacacgtatatgtgttcatacagagacctccgccttccgtaacatcccattctccatcactggcccagtgacaggagcagccattgattatagaaacaagtttctatacacttccacgaatgccagcaattttaaaataagcattttccttacttcattttcttctggttaaaaaaaaaaagacataaatatgtgaagataaaacaacagccatggctttacgcagaaggactggagagcctgggcaagttctccagcgtcctgcagcagaggggagggctgcagcccagccccacaccccacacctacccaacaccgccagcatcctttgctggctgctggggagaaatgaaatcagtttttgtgccaccaaatgtcattttaaacacccaagattagtttagtggtgggaatgtgcaaacaaaaacaaaatgcaaacactcataatatttttaatcctttttttgtttgttttggacatgacacaatcctaactttttgtcatttaaaagtccatttttccttgtccattaatgctgctgtgtcttgtcaaatatttcttttcctttccaaatttacagctattggagctcagagccatccatggaatttgtatttctccacttatcatgggccctcccttctttccctctctcagacaaagatttttcttctcttaaaccaaaatgtcttcagaacgttacagatcatttgatgtaagtgtttctgaccaagcctatgtttgtgaacgtgtgatgtggtgagttgctgggggcacctgtgattccaatggaacctgcccatccagggaccagaagcacaggcaggcggccggacgcaggtgaccscagcgtgcgtctccacagggatgggatggagcctgggttctgagtggctcaggttcactccacagagaaggaaacatggagaagtatgtcctgggttcgagaccccggtacggggggcagggctggcatattgtccaggcacctgagctgctgttcactggctccattgtggcatgtgatgtcaattctcctttgagagtgggctcagctttggacaatacgcatgcagccatgtggaaatggccaaagagggctggcctggggccttttckgagattggtgaccctcctcctgttcttgacctgctcctctttccctggggtgtgtgcggtgtgaaattccctgacccgggtcccaggccacagtctcaggagagatcaaagggcaggcagcccctctgccggctgaggtgggcctttcccaggcctccacactgagaggcgctggggttttgttctggtgcaggctgggccctgcccgtgtggcggggcgtctttgtctggcctgagaagctggaggcccccactgcagacccagcgtttctcaaatgatcaaaggcccagagtcctggacgtgaaacctttcttcccatttccctttctgtaaaggaatgcattacagaagaccagagaatgcccttcccaagcttcccgggcagtcgggcagtgccaacgctgatgttagggccctccagtcctgcatgcagggcctctgcatgcttttagctccagcagctgcggccgcagacagcagagcagcacttgtccacacagcccatcagggattaaggcctttgggcctagttgaagggcctttaaaaacaaactcagaatagttgaagttctttctctactgtccagtttagcagcaagtagacgatgatgcagtttggaatgaaagtcaacaggctcatgttctgcaatgggttttgtggcaggaaagtaggcaccaatctgggaagcgcttacacgtgtcatttctgtggcagcagatgcgtttctaactcaccgataatagacgattgtgtaggaatctgtttttaggtagcctrttcctctctcattgaagggcttggctcacatgtagcaaaacatgtttttttcaagcaagatattttccaaggttgtgccttttacttttttgtcagtgacttcacttactgagggtatttttctacttccccacaattttttaaagggatgaggagcaaccagcactgagggggtactccccagagatgaggtgggctgagccatgctgggtggggtcaggcttcactccccaggggccagcacagaaatgcagtggctgagaagtgtggccaaacttccacggcattcccaccagggtctgcgcctgggccggaagagggtgcctgtgtggccccaggtaccatggaggccatgccaagcagacacygtatgatcccccagcagctgtggctgttgacaaggtgcagagtgastctggggtgactcatttcttttgtctggcaggagccacagaccgggaattttgtgttccaatatgaatccccacggcttgtgagcccatgctggagcgaccttttaaacttcagctggctaggagtacgttcctaagtagtctcacggcgtgaatgtgagtggacggtggggtgtccacacgggcatagacccagctctcagactcagcgactggacatggtactattttgtgtgtggatacacatctccttgcctacggggatggatcacttccgttcttctttgtttccgcgaatctgaatatactacgcacctcatctaagtggagtgataccscgtctgcgcttccgtgactgttatatgtcactttgcataatgccttcgaggttggcctgtgtcgtggtgtgtgtcagcactaacttccwttttatgactgactcatattccatggcatggatggaccgcactttgtggattcatttgtgtattaatggacagtgccgttgtttccggctttgggctgttgtgagtaatcctgctgtgaatgtggatgtgagggtgtccacccacatccctggatatgtccykggggcggaatcgccacatcgaccgtaattctcttatctcttggctgtttgattacagccatcccagtggatgtgagtggatctcaatgtggttttagcatgcatctccctaacaactagtgatgttgaacatcttttaatggcttattggccatttgtatatcaacttgagcaaaacagacatttcaagtcccttgcccatttctgaagtgggctgtttgtattttttgttgttgaattctaagagttctttatatattctgaatactactcccttatcagctatgtaatttgcaagtattttctcccattacatcggggttttttactcttttgatagtgtctttgttacacaaaagtgttcaattttgatgaagtccagtttactttttaaaaaatatttttcttgtgactcacacctgtaatcccagcactttgggaggccaaggcgggtggatcacctgaggtcaggagttcgagaccagcctggccaacgtggcaaaacccagtctctactaaaaatacaaacattagccaggtgtggtggcagatgctactcaggaggctgaggcaggagaatcacttgaacccgggaggcggaggttgcagtgacctgagatcgcaccattgcgctccagcctgggcaacaagaaagaaactccatctcaaaaatatattttttttttcttgtgcttttagtatcatacccaagatatattggccaaatccaaggwcacaaagaccttctgctatctgttcttagatttcctcctatattctcttaacttttaagggcaggcccaagtagtagatggaaagttgcctgtgggaagcgagaggggccatggagcagagagcctgctgcctcgagcgtgtgcgggagcaygtggtcctgatctgctgtgtgtggtgtggtgatgtgggagcacatggtcctgatctgctgtctgtggtgatgcaggagcacgtggtcttgatctgtggcatgtggtgacrtgggagcacgtggtcctgatctgctgtgtgtggtgatgtgggagcacgtggtcctgatctgctgtgtgtggtgatgtgggagcacgtggtcctgatctgtggtgtgtggtgatgtgggagcacgtggtcctgatctgtggtgtgtggtgatgcgggagcaygtggtcctgatctgctgtgtgtggtgatgtggragcaygtggtcctgatctgctgtgtgtggtgaagcgggagcacgtggtcctgatctgctgtgtggtgatgtgggagcacgtggtcctgatctgykgtgtgtggtgatgcgggagcacgtggtcctgatctgcgtgtggtgacatgggagcacgtggtcctgatctgctgcgtgtggtgacgtggagcacgtggtcctgatctgctgtctgtggtgatgcgggagcacatggtcctgatctgctgtgtgtggtgacgcgggagcacgtggtcctgatctgctgtgtgtggtgacgcgggagcatgtggtcctgatctgctgtgtgtggtgacgcgggagcacatggtcctgatctgctgtgtgtggtgacagcagaacgtctttgtcgaatcgtgttttgtggctccccggactttgaaggtccccggactttgaaggccagcagccctccagagccgccttgttccatacagtagccacatgtggttccttagagtcactaaaattggataaagtttacaagtcagctcttcagttgtactagctgcatgacaaagccacagtggctacaccaggcggtgaagctggaagtcactccttcccccacagcaggtcctgggggccacacggctccaaggtggcactacggtggctcctgacttcaccctcaccctcttctcatctccctgggcccagccccatcacccctcgtgtgctggtctccccgctccattttctcctcctgattaggtgtcacacagcagtcagtaagatgctttagacagaaagaccttgggtgcctgcctcggccctggagctgtccccagagccctgggcgagctgtccccagagccctgggcaacctggccactgccgatcccccttggtgggccactctgcctcctttggctccaggactcagggctttgcaggttcttttctgtggcgtggggggcgcacccttcccctccccagggtgcatcccccaccctctgtcctctctggagtcccactggtccattccttctctggcagatgccagggtaaaccgtgaaagtgtggctccagctgatggcagggcagcgtccactgcatgctggatccacgctgatgctggtttggcacctgctgcctgccaggcgtgggttgtgagagcaaaacagagaagccccatcctcctgctgcatcttcctgctctgccgagagacaggtaaggagtctgtggctgcagggtggtggagagcagacmaggacactcccagatgcagagatggcagcttcactcacgggctgtcctggggctcaggaggacccacagaaagcttttcactgaatggaagggggcccaaggggccctccgttctgaccactctgttgcaagctgaggaagcagttctgggaggttgggtgacttgcctcaaggcctccggtcagccagagtcagatgcagaaccctgctcagtctgcaaaggctcagggccccagagggaggatggtggaaggcacacggccccagggacggcgctcagaggcacagcgtggtgtgttccagggctccagggacagaggggcagcttcgctggggagttcctttggggctctcatggaaactaccggaggaagaggaaactgagggccagtggtgaggcgcctgggccgccgagctcagctctctctgggcacagcctggagtctgcagggaagtgggagaacccaggcaggtgctggaggaccagccaggcagtgcagaaccagagggcggggagaccggccgggcagtacaggacccgggggccgaagggatggcatggctgggcagtgcagaaccagagggcggggagactggccgggcagtacaggacccgggggccgaggggatggcatggctgggcagtgcagaaccagatggctgggggaccagccaggcagtgcgggactaagagggccagggaatggagctggaactgaagaacaggccagctcagccacggggcccaggagagggttgagccagacagagccacacatttgggcgcaggcaccaagagaaggaggtgcaggtgcatgaggctcagccttctgcagatgagacttagggggacgcgagggctgggcagaattgggaaagctgagcaggagacgtctcgcttttatgtttggctgaaacatgaaaacacgaagggccagtgggaaagggacctcacagacacgttgggcccgcagtgtctcttgtctcgctcaggcaagtttcaggctgaaaaagtgcccagaattgggtgaggtgggaggagggaaggggagagggagcctgtctgcacctttctcttcaagggagaagttgccttcggtcgggcaggagcagggcctcctctgctgtgtgttgtttattttctgtgcctttccttcccctgagctattctggtgcaagagaaacagtgagggatgtggggcgtgaggtgtccccaggttcccgggccggtctgcagtgccctgtcccgtgtaaggggctgacgacgaacgctggttggagcagtggtccgggggcgtggctgaccccacccaggcagggcacaggcggaccctggtgtcgatcgcctggtgggagcgtgtggacagcatgagacccgctggtcttggggaacacgctctgggcatccgtgtgggcagcactgcccaccatccttcgatggtctcctcgggggtcttcgtccctgtgcatggagccgtcctcactgagtgtaccagctcacaggtctcccaccttcaaggggtctcccaccttcaaggggtcaggctgaccctgctgagccagggttcacatagcctggctgcaggggctcctcacccactcctgggtctgatgtcctcacctgggctgtcctccgcttctcctcatggtcacgcagacacctcaggcccattggatgccgcaaaatgtcgttcaggtcccacctggccgagggctgtcccttctgcaagctccctccttggtcccgggtgctggcaccagcccatccaggcccatccaggccctcccctccctccaacacaggccttgctggcacacatttaggggtcagaccacgccagcaggagctggatgaggccacagcgagggagctggcagcaggcggcccctgagaatgtgggagagaacacaggagagagacggggcggggggggccacagccctgtcggggcagctgtgtcgctgtcaggatgtgcccgaagcactggtccctgagtccacatgtttctgttcaaactcctgtttggaaattcgggaggggatcaaagtcctgccctccaaggttcccgttgsagacacagctccacggtccaggctggcccggcctgcgcacttgcctgcctgattctgctccctgctgccgggcagtcactccttcatctcagtccctgggtcctctccgtcctctgtgcgcatcttgctcacagcctggttgctccatttcctgcggcacagctgccctccccacacagtctgtggtcccccctccatctcctctgctctcgctcccacccactctgtccttccctcattcctctgctcgtccagcccccgccagtgtgttctgccactccctatcctgggtttccaggggcccatgtggagggctgcaggggtctccctgttgtcctggaggcacctcccagagcatcatccctgcccagcccgcaggcccaacatcctccgtccagaccctgaggggctgtccccagaggcagcaggtcccamgcgtccgttcctagcgcctgaagtccaggcacatgcagcctggccttttggcagtggggctccctcgtagtgttgagtaggatgctgggggtcccccgatggagtcagggtgctgcagggggtcacacgctgtcccgtggaatcagtaatcctcatgcaagattcttccaaatgcacagcaactgcgtgagacagaacgtgcgtgtgggaagggcagcgatcccgtgcagtgtcacgcggcccctcggctccctccttggcctgtgcttccgtttctcctgtttccgaggtcaaatgatgcaaagtgtccttgaccatgagcccacgggcatgggacaaggtctctgtgtttgcactgtaagccacggaactgagtcaatgcgtaactggccctgtccccagcccaggcactttctgaacccaaaatagactcagagggaccgaggcagctgccggccctacaggagcaagggggaggagagcctgggctgtgcacctgcaggagggatcctgccagacccccgtaaaggccaggcccccggaagcagcagtaccagcagtcagtgcggcctgggaggggagctggctgcatgcttcacgcatccccgctggaccagtgcatgagcaccttttgggtaaaaggtgcaagtggtgtgtgcgtgttccaggcagcatgagaaggtttgccctgggtgagcccagctcctgttctcctccacctgttcaatattcacaatttggtgtgattgttactcagctgcagacggcctcctgaacgccattgaccgcacatgcttgttgattctgacataggtgttgaggacctagccacatcgtggaggcccccatgtgggtgtgtgtgctctgcactgatctgggaatgactgcgtgtgccccatcacacggatgctccaggatgtacctcagcagtcccctgccttggggctctcgtgctgctcccaaacctcttctgtcagcacagacgctgcgtttgcatctcggtcctgccccggtgccctggcactggttgtgcagggcaggtaggtgggatggcagcaaactgcggtgggcaccgcgtcgcaccaatgtgcacgtgttcacacacagataggactcggaattgtggagccatcgtattcgtctttcccttttaacaatccccccttgaaggccgggcgcggtggctcacgcctgtaatcccagcactttgggaggccaaggcgggtggatcatgaggtcaggagatcgagaccatcctggctaacaaggtgaaaccccgtttttactaaaaatacaaaaaattagccgggcgcggtggcgggcgcctgtggtcccagctactcgggaggctgaggcaggagaatggcgtgaacccgggaagcggagcttgcagtgagccgagattgcgccactgcagtccgcagtccggcctgggcgacagagcgagactccgtttcaaaaaaaaaaaaaaaaaaaaaaaaaaaaaaaacaatccccccttgaatcgtgaagctgtgctcgcctgcacaggggtgcagaggtccggtgtctccgcgttgatgctgccagcacctcaacagtaytatgggatggtccagcagtcgatagaaacttaccaggatattttgcacaattccctgtcctcctggagtattggggatggtgactttaaaatgacagtactcattcatacacttctacattttctttaacttatatttttaataaggatctggaggcatttcagtttctccaaaagaaggatttagaatttgttcaaaggaaaaaaaaacataagaaatagctagtttgttatgattctgatctacttgattttcaagtgaataagatgcagatttgcctcctttgatcccagcaatatgttacaacatagacaatataatttatctagaaggtcagcaaaaaaaaacctgcttataattttcataagtctttagttaagatcatccaggaaaggtgtgaagtaaaaactcagcactgaaggcccaggagagtgtgtgtgtgtgtgtgtgtgtgtgtgtgggagtgtgtgtgatgggtgtgggtgttgtgtgggcctatgcatgccgtgtgtacctgtgtgtgcatgcacrtaggtgtgtgcatgtgtgtggtgtatgagtgtgtgatatgggtgtggaatgtttgtgtgcagtgtgagctgtgagtgttctgtgtgtatgcatgtgtatgatgtatgtgtgtgatcctgaatgtaggtataaaggatgtgcatgtgtgatgtggggtgtattgtgtgagagtgtgaagtgtgggtgtttgtgtgcacatgtgatgtaggatgtgagtgttgtgtggtgtgtgcatgcctgtgtgtgtgtgtgcatatgtatgacctatgtaagtggggtgtgtgtgttgtgtggtgtgtgcatgcctgtgtatatatgtgtgcatgcatgtgagtatatatgagtgtgggtgtgcatgttgtgtgagcatgtgcatgcctgtgtgtatatctgtgtgtgtgtgtgtatgtatgatacatgagtgtggggtgtgcatcttgtgtggatgtgtgcatgcctgtatatatgtgtgtgcatgcatgtgcatatgtatgacattgtgtgtgcatgtgtgtgcatatgacatgagcgtagggtgtgcatgtcatgtgggcatgtgcattcctgtgtatatgtgtgtgcatgcatatgtatgacatgtgagcatggatatgtatgttgtgtgagtgtgtgcatggctgtgtgtatatttgtgtgtgtgcatatgtatgacatgagtgtgggatgtgcatgttgtgggcgtgtgcatgtgtgtgtgcatgtgcatatgtatgagtgtggggtgtgagtgtagtgtgggcatgtgcacacatgtgtatatgtgtgtgggcatgtgtgtatgtgacatgtgagtgtggggtgtgcatgtttgtgtgaatgtgtgtgtgtgcatgtgcatatgtatgatgtgtggggtgtgtgtgtttggatgtgtgcatgaatgtgtatgtgtgtgcatgtacatatgtatgacgtgagggtggatgcgagtgttgtgtggtgtgtgcatgcctgtgtgtgtatgtgtgtgcatctgtgtatgtatgacatgagtgtgggtgtgagtgttgtgtgatgtgtgcatgcctgtgtgtgtgtgcatgtgcgtatgtatgatgtgagtgtgggtgagtgttgtgtggtgtgtgcatgcctgtgtgtgtgcacatgtgcatatgtatgacgtgagtgtgagtgtgggtgtgtgtgtttgggtgtgtgcatgcctctgtgtgtgtgcatgtgcatatgtatgatgtgagtgtgggtgagtgttgtgtggtgtgtgcatgcctgtgtacccatgtacatgtatctgcatgcgtgtagtgtgtagtcagtgccaagtggcatccctgagacccaggtctggggagggcttgaaccgtgtggggcacccagagcatccccaaccacagttaccttgagccgagttttgctctgccagacgtgaggggctctagcttgacctctgcacccagtccagttctggggtcacctcggctgacatggagagctagaaagatggggtgtctgtgcccttcagagcccagtcctcccacagcgtgagctccagacaaagcagaaacatcgcagcctgggtgagtgaggagctctgcgctcctggggcacgggaactgttccacttcgttccttatctggattcttaataatcaccattcgtcatgtatttgaatgcatttagttaggaccaagcttttcttcagttcttccagagggtagagttgagaaaattttctcctgcaagtaaaggcctctctctcttgaacacttggcacacattgtcgtttttactttcaagaaaaaaagaatacattgcatccctgcagtttgcaaaacctctgagtaaaattgtaataaaacttacctgcgctcatgcagtcattatccatgaacaggctgccggaagccatgcggaagaatgacggtcaggagacggcgacgatggccctcccggcacaccccatccgtccgtgttcactgtttactgggaggatgtggtctagggccatgagctgaatcacacagctcggtcagccaagagccagagtccaggagaaatcaaacaagccttggaaagagacaccggtggcatatttgcttggttttctttaayttcaaatggattctttcattgtgacagatagttttaatactttaatactaatattcttttaatggcttttgtttaatggttaacattttttatctaaagctaaaaaaaaaccctctgttgtcttacaaatgtatttaaccaatgtataaacttttaacccaatgagccctgagtgaattagaaaataacaatgagagcgatttacatttgctgagcttggcacgggatggtacccagtggccattcgggtgccagcggagcacgcagagcctggtgtctgtggctgcctccctggtccactaacacgagagaggtgggtcttcctgggtgtcccaggcacgagggtgcagcccaacccaaactgacttggccggtgctcaccacactgggrcgcccgccacactggggcgcccgccacactggggtgctgagcaagatggcagcctgcgtcacttccctgtagattcccgacatggacaactcgaattaaacctggtcaagtagcagaaagtggctccactgagtccattcatttccctggtgtttgaatcaccatgatgcttcttaggtggaaaacgcctgggacttctccgtggaccccacgctctgtccccggtagacatcgttaaggttcctttctttccttccatctggattttctttgtgtgtgcgctgactcctcgactgtttgcaggcttttcgatgtcagcgtcacaccactgggcctttctgtttccctggaatttaactttcgttagctgctccttcaccttgtcagcaaaattggatttttcaagagagaattctattttaaatgcactagagggagctttctatgcagtggaggctttaaatgaatcctttgacactaagaaaagccttttatcaagtgaagggggacacacgcccaccctatcccaccctacccacccagcaggtgctttatcaatgccaacgttgtgcccctgcccggcctggccacacccatgctcaggagggcacaagagcgggcaggatccrgcgcccggcctggccgcacccatgcccaggagggcacgagagcgggcaggatccggcgcccggcctggccgcacccatgcccaggagggcacgagagcgggcaggatccggcgcccgcctggccgcacccatgcccaggagggcacgagagcgggcaggatccggcgcccggcctggccgcacccatgcccaggagggcacgagagcgggcaggatccggcgcccggcctggccgcacccatgcccaggagggcacgagagcgggcaggatccggcgcccggcctggccgcacccatgcccaggagggcacgmgagcgggcaggatcyggcgcccggcctggccgcacccatgcccaggagggcacgmgagcgggcaggatccggcgcccggcctggccgtacccatgctcaggagggcaccagagcgggcaggatacggcgcccagcctgagcctggctatccagggtctgtcccttatgaaagatctcatgcatgggctctatgaaagcttctgtctcyaccacacttgaagtaaggagttagtcttaatcctggcatgcaagaagcaggagccgtccacagcagacagttgattttcctgctacatcattatggacctaatgctggtgctgcacactttttaagcgttaactccgtttcctccgctcttcagttttggtctmgggctcagcgcgactcggaggcacgctcccgtgtcattttgtatttccgcccggttctccccatgttgtctggggatggcccggcaagtctttctccttcccttttttcacttttcctcacaaaccacagcctgagagggagccacgatgtcatgaaataagagagactttatccatcayattttatgtgaggacgacgacgccactctgggagacagccgccagcaacagccatctccagagatcagtgcacgcggagggagagccccttcctcgcccacacctgctacagctcctgacggcttcatggctccggccagaattcgggagggcggttgccagtgagggacagtctcccaggattcccactagcaccatcatacacacagcccttcagatgacattgctgttgacagtcgttttaaaaaagaagtttcagggactgaaagcaagtaccctaaagccacctaacggagagaggctttaactctgtggcccagatgaaccctcaacgtgatgtctcaggagggctgagagctccccgtctcttgagtcagactatttataccacacttgcttctcctgaggttcatgactcctgagacagaaagctgaggggtcccygtagaagccgctgctgtcctcgtgcctggaaggcttcagagaacataactgattggatttcactgtctcccagaagagtttgctcacgagatctgtgaggttgcctgagcatcaaatgtgttttgtaaattacacgtaatcatgcgtcatctcactggaccctcactggaccctggaaacgggaggaaagcccctccagaggtgaggctggcccatccagcttcccggccaggcccagcataggcacgcggagcggaaacccacacctcagcactgtagcccgagcttccccacgtcatgtgacacaactcgacgtctgtcggcaaccccagcactcctgcctttaactcaccttttttggttttgggaaaatttcttaaaagccaatagacatcttacgtttttaattacacaagactggttgtaatacattttgtgtattagaacccggtttccaaacccagcagcgtatggccaaagacaaatagcgtgctctaaacgtgggtgtgaggccccagcacatggagcctccctcatcctgcacctcggcccatcccctccccacgtggtccaggtcagcatctcgctgaggtcagcagtyggggtgtgtgaggagttacgagacccagtgttagatggagcctgtacatttccccgtttctgagctattattcacacggccagccgctttgcacgatgacttcccttctaaatgagagggcaggtttccctgtacatagaaatatgtaaaaatacatagaattatttttatcgggaagctatttagttatgttattgttttttacacgtggtaattaaacagcaaacgtcttgccatttcttctggatgatttctaaagagccaatcaagcagaatgtggtgcgtggtggccgtggggtacacggtggctgtggggtgtgtggtcagtgaccacagggtgtgcagtggccatagagtgcatggytcctgtagggtatgtggtggctgtggagtgtgtggtggtcatggggtgtgtgccagctgtgggttgggtgctggctgtggggtgtgtggtggccgtgggttgtgtggtggctgtggggtgcgtggtggctgtgggttgtgtggtggctgtggggtgcgtggtgcccatggggtgcatgctggctgtggggtgtgtggtggctgtggggtgcgtggtgcccatggggtgcgtgctggctgtggggtgtgtggtggctgtgggatgcgtgctggctgtggggtgcgtggtggctgtggggtgcgtgctggctgtggggtgcatggtggctgtgggttgtgtggtggctgtgggttgtgtggtggctgtggggtgtgtggtggctgtggggtgtgtggtggctgtggggtgtgtggtgcccgtggggtgtgtgatggctgtggggtgtgtggggtgcgtggtggctgtgggatgcgtggtggctgtgggttgtgtggtggctgtggggtgtgtgatggctgtggggtgcgtggggtgtgtggtggctgtggggtgtgtggggtgtgtgatagtggggtgtgtggggtgcatgctggctgtgggctgcacagtgtctgtggggtacatggtggccagcggccttcctttgggtgagccccagctggggtctgtgtttagcttgagcctctataccaacttgagatgcttgaaagatgctgtgaattgcagcttatttatccttctgcctacagttgtggtatttttcacatttaaattgcagcacagttctgggttcaatgtgtccagaagccacagctcctaccaaaggtacagtcacgggtgcaacagacaatatgggcatttctgagttgttttggctcaagcacgaatgtttgtgcagtgacactgagactaacctggcgctctccatgcagggacttgactttcataagacaagcttgtctcagagaggccagttcccctgcgtcgtttctgccatgattctgctgtgtaggcaccaactgcaggagtgtccgtgggaggaggaggaggagaggaagcggcttccttggccgccacagtcatggccgcaggaggggtcctttggcttcctcccttcctctctaccatttcacaaactcacccgtttgtgtcaggctgttttaaatttatggatttcttttaaaacaagattgtatttactgtagccttgtcgactttttaggcctttggagacccaaaaggagcaattaagcaaacccgtgcacctgaccccgccttccacccgcgtgagctgccagctagttccctggtggccgagctcacgggctgccgcaaaagaaagccgccttttatgcctgcagaggctctggcttaaaaggtggtggccctcatggtgttccctgcccaggagaatggggtcctttaaccaggggatgggagctggagggacggccagcttagccccgacagtggctcccatcaccacgagccctgttcctgccaggaaatgccagtgtctccatcttctgtgctcaaaggtggggagacccaccagccaggcagggcaggtggggtggtcatctcgcgcccggcctccctggtggagccgctgtggggctgtcctgacagccagattctccacaccacctgctttgttctcccttcatgcaaacatgacatttggttccaacgtgtgtcctccccaggcctccccgccacccctgccgttccctcctagctgcccgcagttctgacttggaggtgcttcgcaggcayctgctgtgacttggaggtgcttcgcaggcacctgctaccctgctgggatgatcctcctggagcctgagcccccactggcttcacagttgccaccccatgaagccacagaaccacagggaaaggaaattgaggaacctcgggaattttaaagcttctctcctgattcgctgggcgaggaatgtggtgtgcactcaggttgcggccggagagaaaggcctggggaccacctgactctgggccacccgggcctcctcaggtcttcggccagcgctgtcctgcccacggtagttggggttccaatggctgcggcttcttcctgtctgtggcttggacatgccattggccgcgtctctatttcctcatctgcgactcgggtgaccacagttctcagttcaccgtgttcggtagaggtgacatgaagtgcctggcacccatgtgggtttccctgtgggattctgacccgcttcggagctgcctcctgctcctcatcccacacttctctgtgtttctcatcctggcggctgtgtcctgtctgcccctctcaactgcaacacgctggagaggtcgggaccctgtcttgctcattatctgtctactaaagaacctagcaaaatggaaaaataacaatatgtgctgaattaattattagcttaaaatttaaaacttaagtagcatgatttgagtgcagccagcatcacctgccgtgagatcggtgctgtctacaggaggatggagcttttggtgaaccactgagctgggagtagctacgggcacctttacccagtcccaaaatgtggaacatttgagtttaaaaagcagaaaactctacagttaaaagccaatattaaggttgagtccattaatctaaattaatctgattttttatttctttaaataaaaaagtaatcctatgcaatcaaagttaaagttcgtatatggctccctatgaggtactacattccctgaagtgtcacaaaaaaaaaaaaaaagaaaagaaagaaaagaaaaccagtacagctttggtttctgacggtgacggcctgctgttggtaagcatcttataacaatttttcagcccagctttctggaattaatgctaatgaaagctgcccctgccttcgtcttctacatgaacactgaaattgcagccgcctgccagccggctgagggatgagcgtaataattttcaattggcctctcagcccagagggaacgtggctagcaggagattgacagatgtggcatggattatcttgtgctctgaactcagcccaatttgtggtttgttgcaggtgctaaagagattgatatcgcagcgaccctggagcacttgagggaccagagacccggcatggtccagacgaaggtactgtcagtctctcctccgggacgcagacccattcaaggtgcctctctgcggccgtgttcctgagaggagcacggggaggcctggtttaatgtgagccgcacaccgattgctctgctctgaccggcctcgtccatgccggccttgcatgggcggggtcacttctgggcccccaaaggtccactggcgtttcctgcaacacctccagatgcagccacatctcaagtcctaggaactcgatccactggctctttccattcactagatttgggggtggggggagaacgctgcatttttgtagaaagaggttgacgataaatcccagaaccctcaggaggatgttctgagctctctgagcgctgcccggcctctccggggcctgcgctttgtggaggcccccagggcacagcatccttgagcacccaaaatccctcatgcttgctgaagaggcccagtttgcagcaacagaggtcaaaacaaaaaaaattctggtgagctttggctcaacaagaactggacgtgaggttgacgtgtgtctggtctctctggccctgaggctggggttggtgtgcctttggcctctctgctccttggtttcatttcgccctctctgtgcaactggtaggaccatcacgtgattttgtgaaagttctttgtaagtcttgggacactatattttattcggtttttgttgttgttgttgtttgtttgttgttgttgttgctttctgagacagagtctcactctgtcacccaggctggagtgcagtggcacgatctcagctcactgcaacctccacctcccaggttaaagcgattctcctgcctcagcctcccaagcaaaaaatataaataaaatgcagaaataatccaccaaccctccaccaagtttccccaaatgtgaacacctcacataaccacagcgcagtgaccaaacccaggaagtcagcaccgatgcaaaccactgaccaacaggcccagcgatgccctacgcgcccccccagggagcttcccctggagcaggacacgcccagggcggccacgcgaggggcatcatggttcctctgctgtccgggacgcttcacggctgtgaggtcttctagagcgccagcggccttgctctttgtggaacgtctcttgtctaggcgtgtcccacgtcccccatggtcagggcagggggcaggactgtccctcacgagggagcggcacatctacacccactgaggcgtgtgtgtctggaggcttctgcgtggctgcgtgatgatttttccctgtgtggttactcagtgtcccgcggggagaagctgggactgtgcacatgtctgtctttccttctgcttgttcacaacagcattcggcatgtgttgcgaggctgtcgagagaggaggtgacacgggacagctgctgttccagcagcaacagccatcaaaacaaaaaagttctcatgagctttggctcaacaggaactggacgtgaggttgacgtgtgtctggcctctctgtaccaaggagttccaggttttgtgccatggaagggtccaaccttggaagggtccatcttgcckcactgaccatcctcctgtactggctgcctagcagtaaaagaggtggccttgtcaaggctggcacataccaccttctggctggccctgcatcccgtgagcttcaggtggctctgaactggacagaggaggccatggaggctgggagaacggggcacacattaccaggaatggtcagcgagagccacctcaggcaggtgtgttcgtgactccacagtgaggcccactctgggataagccccaggaaatctaaattcaaagtagtttcctccccacacctctgcctgcctctcaggcagcctctccctccagacgggtgagttcacccagaacacctgcctgtcaggcagcctcttccctccagacaggtgagtttgcccagaacacacactggctttaggatgggtctgggcaaaatcatcgcaaggggatatctttgccaaaagtgaaaaaaatcacaaggagcaaaccctccaagcctcccattgtrtgtatcctgttcgccagaacaagcccttcctggcacacagatggctgaggtgcacaacggtggtcccaggacccttcgtgaagtgaggtgctttgggactcatcagagaaagaggaagccacagtcacaatcattacatgccaggtcttccgttctactccatttttaaatggcaagatggcagcaaagacatggaaccaacgcaaatgcccatcaatgatagactggataaagaaaatgtggcacatatacaccatggaagactatgcagccataaaaaggaatgagatcatgtcctttacagcgacatggatggggctggaagccatcatcctcagcaaacaaacacaggaacagaaaaccaaacactgcctgttcccacttataaatgacagctgaacaatgagaacacatggacactgggaggggaatagcacacactggggcctgtcagtggggaagggggatggggagcatcasgatgatagctaatgcatgcggagcttaattcctcggtgatggattcatgggtgcggcaaaccaccatggcatacgtttacctatgtaacaaagctgcccgtcctgcacatgtatcccagaacttaaatataaataaataaataaatagcaagatgataacacatacacaccccagccctgttgcccagatcacttggtgacccgaagctccgttttctgcactccagataacagagtcagcttcctagctgcttccttcttggactgggcgtccggaggagttcaccctcttcctcagggtgtgtgttcaggagctgtcttggagcatgcacataaattcagctcctggaacttcaaggcataaggaaatggraccatgcgaaagtcaccatcacatcttaatccgtgactgcgctgcccaacatcgccccgagactaaacttcccctasaagttcartttcacaaagatagaaaaattatttgggcaaaatgctgctgtccaatctgaatgcttgcttctacgaagcmaagaggaggcgcctgcagctcctttgaacggaggaagtcacgtcgcctggtttggaactgaagacaaggaaagagcgagccgtcgagggtgagcacccggagaccatgaccaggatgaccgcaggccctgacagcaaaacatcatcgttgtggtaaaaaagatgcccctcaggagagctgtttcctccctggaatttgggtcgaatagaaaatrtttcaccagcgcccacctgagcatttggcaactcagtcccmgaccacaaactccatcatcttagaagagaagtccaggcacccaggggctgaacggcagtgcgggctttgacaccacacgagccgccagagaggcggcacactcagccacacacactgygtacacccacacayctgcacactgcgcacacccacaygcagccagggacactgcacacccacacacctgcacacacccatgcatacatccacacacacctacacacccactcacgcagtgcacacccacactcagccacacactgcgcatccccatgcacacacccaggcacaccccccacacacacctacacacccacgcatgtggtacacacccacatacagccgtgcacactgctcacacgcacacacctgcacacagtgcacacctacacacagccacggacactgcgcacacccacacattgcacacacacccacagacacccacaaacaccactcagccacacactgcacacacccacacacctgcacacacccatgcatacaccccacacacacctacacacccacccacggggtgcacacccacacacacacccatgcacactgcacacacccacacacctccacaggtgtacacacrgtgcacacccacacacagtcatggaccctgcacacccacacacctgcacagctgtgcacacccccacacacatccacacacccacctgtacacacccatgcacacctgcactgctgcacacacccacacacacctacacacccacacacgatgcacatccacacacagctgcatgcacgcacacacacccgcacacattcccgtgtgcacacaccctcagcagacacaagggatgccagacaaggctgaaatcacccctctctcccgtccatgcctctgtggtagatgatgggttcttcccttccttccctccacacgtctcaagagtttcccatttcaccaaggaccttaacactttcctgcccacaatggtgtttcctcttttacatctgtcagttccagaagtagagccagtgatgagtgtgtcccacacccaagaagccccaygccctcctcactggacgggaggccccgccccctcctcactggacgggaggcccckcgcatgtccacgtgctgcccgtgcgtcactctccccaacctgccgtctcacatctgcattttagtttcttccccattttcttctgcaccagccccttgtcctaaagcctgacctcagcctcctcctcagacgtacccggtgttgtcctccgtcccagaagcagggcgttgcccagacatgctcctatcttcccaacccagcacagcaccggagtgacagacacggattctgtcacgcgtagcgcagtccacgctcacacrtcagctccaggcccgcagcccacttctcccaaggcctcccgtgccattgaaactgttcatttccgtagctctccatctctctccacctctctccgtctctctccacctctctccgtctctctccgcctctctccgcctctctccatctctctccacctctctccgcctctcttcacctctctccgtctctctccacctctctccgtctctctccacctctctccgtctctctccacctctctctgtctctctccaccgctctccatctctctccacctctctctgtctctctccatctgtctcccatctctctccatctccgtctctgtccctccgccctggtgtacacacacacaatgcctagtccctaacttgggcagggctcaactctcacggtgtggcttggagcttgtctacttttgtgaaaagagaagctgaaggtgacagacacaggaaggtgtgtcatcctcacccccttttgagaggtgctgggggaagctgccccgcagttatgtgtgcagcctcctggagggcacaggtggctcagagacacgmtcactgaggtccyctttaaggttcctatttgtacatctccacccaggcctttgtttacacctgaaggattacaaatataaacataagcacaaatmgaaatccaagcagcctccacaaagctccacggcttccagccctggctgacccttaccccagcagcgggtgtccgagagccatggcagctcctgcagcctccatccctccaccaactatgtgggcaccccgtggttgtcccaggacagcctgagaaggggcgttcccactcgctgtccagcgtggacccaggggtggtgaccagacagcctgacctggcctgagcctggctcggccgtcccacctcagccacttctccaccgggtgcagttctactggaagaagccgtgggatctttctccaacaggcctcaaattttattgtagtatgtgttcaaaaatgctttcttgcttagaatgtcctgactcggcctctcgaatgtcctgtctttgcaaacccaggaggctttgcacccctcctgttcagactgctggcactcagatgcagtttaggctaagatggtcatctggtcatctgttgctgttgtattttactcctttgaaataaactcctatcataaaagttatccaaatgctggggttttcccagcctacccgggatctagagcatggktctaggtgatacttgctcagcggattctgctcagaacgtggccacagaccttcgaggacccacagggcttgggtgctacatcccggcgccgcatgcagctgacacttcacgataaaggacaagatgatccacaagcccctgtcccctcaaacgccagctctgaggctcacagcacccctccgggaagcaccccctcctcctgccagccgacgcccacagggcccagtgggctctgagtaaggtgcacggcacacaccagcccacacgcccggtggagcttctcctttgagctaaacagtgcggtaacaattgccaaacatggccagtgagtagagcacctgtctctgtggcccggttcccttcctgctgctctgtccggtgactgtgcagtgttggaaacagttatgatccagaccctggtggagttccccctgcccgtcccctcccccatagcatggatattgggctttcctgttggatgccgcaagtggctgcctgagaggccgctgggcagctctgcrggattagcactggccctgggggtggagcgctttccagcctccactgcatgatggggctgcggggcggcagcgcttctctattcttccctttaaagatcatttctcaggctagatttccagtgtgtcggaagatgtaaatagatagatgacacttgcatttcgcttcccaaaaagccacgcttaatttttggcatctccaagccctcacagagcctcagggcactggcagcccagcactggggaagaaatggtctgaatggctgttgtgtatttagcctggatcccctaaacagcaccttcatcgaacacacttggtgtgggaggggcaggagtcagcatttagacagaacgtttgcggaccttcccggcacagcccgacctgagcccctgcccccacaggggcagctcccacgtaatttcgaggagcagaaaggtgccctctggcagtgcagaggggagagagacggggcgcaggcagacacatctccccgggtcccaccctgaggtggccgmcaggctcagttgactcctttaataataggttctaacacgtacactaagaggccgcgtggccacactaccaaaggcaggtagagtccagcagaccattccgtcagcrtcagggcrgaagaatatgaaaggagaaactgtcttttgtctcagaatgagcatcacgttattttgactttctgatgtctcggttcaagctattttccatcttkctgttatgcactaaacattcaaaactggaaattaatcatcgtttttggcttggggctgccctgttccttaaatgatcaagtattggagctgtcaacagggctttccttccagaagttgttagctgggtaacagtgttgtttccgtccacgcgttctcagctgtagctggagtgctgctggcctgctttggagttttccatagcagtgttttgaggtggaaactgaagagcaagaggaaatgagcatttatccacctcatctgtgggagaggaggcagatacgctctccggcgctaagccctggtctttggaggagcgaatagtcctggcatcgtgaacccgtccctcgtgcccactggatgctctcggcaggctgtccgtggagggaggggtgcccctcaggtgtgcctgcccaagtggctgtggacgcgcatgccctgagccaggaggggtgtggacaaggggaggtttctcagcatgtggaacggagtgggtttggtctgagtaacaggtggatttcaaaagcgatgataacaccacacttccgaggacaggaarcgcccaagcatggccctcattgtgagttttaatggccacgtctttgtagtgtctgcacctgcccctcacaccgtccaccaaggcgggtggctgtgaggaggaatcgtggagtcgtagggtcagaaggacagggcagtacgcaggaaccgttgccttctcgctgcttctgtgggcagcttctycccgcagggggaaagatgaggcttttctagtgcgagagaagctcaaacatgtgtcactgttgtgtctcccaaaccgaagggtacactgtcctttctaaggaaatctgagccttttgcttttttttgctaaacaatttctttctgcgaaatggcccggggagctgatgctgcgttgggaaggggggacgccgctttcatctgcagggagccgacrctgtggcaggagtcggggggacgccgctctcattggcacttctctcgtttctcgccctgcaggagcagtttgagttcgcgctgacagccgtggctgaggaggtgaacgccatcctcaaggcccttccccagtgagcggcagcctcrggggcctcaggggagccccyaccccacggatgttgtcaggaatcatgatctgactttaattgtgtgtcttctattataactgcatagtaatagggcccttagctctcccgtagtcagcgcagtttagcagttaaaagtgtatttttgtttaatcaaacaataataaagagagatttgtggaaaaatccagttacgggtggaggggaatcggttcatcaattttcacttgcttaaaaaaaatactttttcttaaagcacccgttcaccttcttggttgaagttgtgttaacaatgcagtagccagcacgttcgaggcggtttccaggaagagtgtgcttgtcatctgccactttcgggagggtggatccactgtgcaggagtggccggggaagctggcagcactcagtgaggccgcccggcacacaaggcacgtttggcatttctctttgagagagtttatcattgggagaagccgcrgggacagaactgaacgtcctgcagcttcggggcaagtgagacaatcacagctcctcgctgcgtctccatcaacactgcgccgggtaccatggacggccccgtcagccacacctgtcagcccaagcagagtgattcaggggctccccgggggcagacacctgtgcaccccatgagtagtgcccacttgaggctggcactcccctgacctcacctttgcaaagttacagatgcaccccaacattgagatgtgtttttaatgttaaaatattgatttctacgttatgaaaacagatgcccccgtgaatgcttacctgtgagataaccacaaccaggaagaacaaatctgggcattgagcaagctatgagggtccccgggagcacacgaaccctgccaggcccccgctggctcctccaggcacgtcccggacctgtggggccccagagaggggacatttccctcctgggagagaaggagatcagggcaactcggagagggctgcgagcatttccctcccgggagaratcagggcgacctgcacgcactgcgtagagcctggaagggaagtgagaaaccagccgaccgkccctgcccctcttcccgggatcacttaatgaaccacgtgttttgacatcatgtaaacctaagcacgtagagatgattcggatttgacaaaataacatttgagtatccgattcgccatcaccccctaccccagaaataggacaattcacttcattgaccargatgatcacatggaaggcggcrcagaggcagctgtgtgggctgcagatttcctgtgtggggttcagcrtagaaaacgcacctccatcccgcccttcccacagcattcctccatcttagatagatggtactctccaaaggccctaccagagggaacacggcctactgagcggacagaatgatgccaaaatattgcttatgtctctacatggtattgtaatgaatatctgctttaatatagctatcatttcttttccaaaattacttctctytatctggaatttaattaatcgaaatgaatttatctgaatataggaagcayatgcctacttgtaatttctaactmcttatgtttgaagagaaacctccggtgtgagatatacaaatatatttaattgtgtcatattaaacttctgatttcacattcaggtggtctttatttggggaggaggaacaattgtttccatccgtctttttgtttcctaagccactggactgtagatgctgaaacaaagcgtgggcgtttcctagaactccaggtcatgttgctactttatctgcagcattagatgtgtactaagggccagggtgtcgctgaggtttcatctttaaaacaggattaaacagtctcagtaaggagccgcagatcgcatccatgccacacacgccctccgtgcccctccgtgcactggcaccacctggatagggcaccctggggtgggagatgcccccttcctccccattctcagtcctagatgctaacaacgggccctgacccagtgaggctcataatgtctctcacctagcactccgattccatctagggactgtccttctgtccttggtgggaagggagacctcgtccccaccagccacacaatcacacccctccacctggcaggaaaatgcagcgggaatatttaaactgtaagcaaagaggcaggcactccggggcgtggtgcagcgaccaaccttccgtcctgccctcggctatctccactggcaacagtgagagaccgaggacagcagagtgggctcgtcccaaaatcaggtaactcctaagcagtgccctccagctagaggagcttggtgtttaagaaacaaatattgaatgatatttgttaatgcacaggaaggaaaacttgattcaggaccagcacaattggtacagggagagtgccgggggattttgcagtgggggagagagactgggctcgtctccgtccatttcacattgctctgaaggaacacctgaggctgggcaatttataaggaaacgaggtttttggctcatagctctgcaggctgtataagaagcatgacgccagtgtctgcatctggggaggccccgtgtgtgtgcagagctcagatggagagagaggaagcaggagatggcatggagggagggccaggctctttttaacaaccagctttcatgggaactgccagagtaagaacttgtcccccaccccagagcattaatctattcatgaggtatccacccccatgacccaaaaacctcccattacgccctacctccagatttcaacatgaggtttgcagagtccaatactcaaaccctagcagggctcagctccaaacaccacatgggcagcggggcttcccagccaaggagtgggctgggatgagtggatggagagttaccaaaaggaagcctcagggtcaggggattctggctaaacccacctaacagggttcttgctgaaggcaagccagggtgaccgccatcacctggggatggtggaggatgagggacccaatccgatatcgagggtgaaaaaatatcaaggtgatcagatatcaagaattgggggggatggctcttgctaaactgactttgcaggattctttgctgaaaatgtcattttacaaggacatgcacagactggcctagaagaaggttccaaagcccgactaaaggttggtcaagcagagaatctttacacctttgttctcttctttcctttgaaaaatataagttcccgttcttgttttgttgccttttgttcagtgaggactggcagagtcaccagctggggcttggtggtggaggagttcagctgggtggtatgaggcatcagggctttagtgaggggaatttagtttctacaaaaagaaaaagaaaaatagttgggacaaactatgaactccgattctgagcccagagggcaggcagtccagaagctttctagatgctgggctggtgcatctccggctggaggggagcgggccgtcctaaaccacaggctccctggttggcagtttggatgccatgaaagttgtccctatgagtgctgaggtttatatcaagtcgtccagctccagcttgcaaggcttcaggaaaaaggcaacaattcccaatttgaagaatggaagaaaatgggaaataatagtttggaaagtcgtagtcagatgttggagggaacaagaagaattctggatccatttcagattgcaggtaggtagtaaaacctcaaagaggccagaatctaacagtagatgtactatagttttctcctgaaacataatttttctctctcaaatcgccttcatttctaaccaaaataatcaaagttagactgatttgtttgcaaaataagtttagtgtcataaacttgtcttgattatttgtatcaccgcagcaagaatagtgattgacaggctttttaaagtttgctttgctggaacttttgacaaagagtctcagattggaccggtaaagactcttgaggctgtgaaaacacaccaaggccttgcttcaggctgtatgtgtagcacctatagatttgggcgaattctctcttctcaaggttcccaaaatatcctgtttcctgggcctgccaagaagtgacatccctaaccacctgtaaaactggaaacagggaagcttttccagtgggggctttactggccccataaagtcaacctcagtttcttaaagttgtctagtcatagctgaaaatatgacatagcagtcaaagccttggtaatataaccagcatttctagtgatgtcttagtacaaggacaacagattcttactgaacttacgcaaataactatattgccacaaaaataagaatactcacagtttctgaattctagatggatcaggtaagtagaaaaagtaattgtttcagtttttattcacaaaagtttacggaacttctgtaaactatagatagggttaaaaaatcttaattaaaataaaacatttaaatcaattaatacaaaaaatttaaagaaccaccaatatttccagcaaaaaatcattctaaaatatcctcatcggtgtagttagtcccatgtaattaattctgtcctgcttgatcttagttagcaattttatgaactcattggtttcttcattagagttctggaaattcttacccagcccagtggcatcttaaatttatcagaagccagtatttcagagtgcttgtcagagtattttccatgattttttgaagaagaagtaatcttggactgtaactaatggcaaatgcttttagagaagaattaaaataaaagaatagctgtctatgaatgacagagacttaaaacaatcatggttaaaaatctgatgagagtttattttaaaaatgatgtgattggcaaggaaatttggttatttgtgtagtacacaacatcttagtataaccaaaattttgactgataacacattagatttctagaaatctcatacaatttttggaacactcatatcagtaacatacccataaatataactcacagaagatttatttggaaatgcttcctatataatttaacatataaaataagaataattgtttaatattactctattacaaggtgagagacacattttttgaccttccaggggcccaagtggaaagtcccaaagttaatttgaagtcacaaagacttaatttagaatttgattttgggaagtttgtacaaaatgtcaaaaagtttaagacactttattaaatatgatattgattaatcaaagcgataaaataaaggcaaatgcagaaggttacatagttgtagacaagaacttagttcttttaatacttagaagatctgcttttcttaagtaatcaaagacctaataaaagacaacatgaaacacaagaaattatcttgataaaacacaaaatatttgcttcctaggtcaattacttaaaagacaaggaaactccttcatattctcagatcaatactccaagaaaaatttgtcattttaacagataagaccaaattctacttttgcgtcaatgtacaactaaaactaatttttcataaaaccttataagtgaagttatccatttttagtcagttttgaccacacaagataagattttcacaacacttttacagcctctttttttcctttcacaactgacatgcgtcaagcaattaagcaattcatttttagtatgcattccactgtacggtgggagttataattttatggcctgaaacatctaacagagacaacacaaacctgtccggcaaaaacagacaaaattgtatgtctgtattatatttaatgctgacaattttgaagatatttctgtttttatttttatcagtaattgtaaaactagtttatttttaaagaattactcaagtcacatgagctaaagggcaattaagttggtttctattttctgagataatactttatatagtgcttattttaagctaatcaaatagagctcttttgtgtatgttggcagcatcacccagagatagaaaaatattccatacccataacatatatatatagatccacacttaaatgtacagatggatgcaagcagatcttttaatttttcaaaattttagtcatgaggcagtaaaacagactaatacatacaaactcattggtttatctccacttaatatttttatacaaattgtgtttctgatgaaaatggaacaagctgaggatacctacttaataagggatacagctatttaccaatatttgtcgagaaggcctttaagatttttcacttgcccagttccaaagagtttctttttcctcttttctgcctcaagtggaattttcaagacactcttgagtcccttgagcctccagtggatccctttagaccccagtaggagtctagagttcaagtgggtgaggggctggagtagggagggagaggaaagggcctggcaggggtggacagagttagcagagctcagagtcagctggggtgcgggaagagggattccaggtgacagagaagtccccatgggagaagcaggagctggtagaaaacagacaacagagaaaagaggggggcctcacagagagccaggaggaaggtacttccagcccagggaatgagagacaaatccccactcaggaacgagagccaggaggaaggtacttccagccccacagttaccttcccaaggaagcctgagattcacctagcctcagagagatattcatacctgaagaatctaaatctgtgctgactaccttcaacagacatttggttcaagagtctgactcaccagtggaccccactcagtcaggagtgaagacaaagtttcaaaggcgtacacttagggtcctggataagggcccaggggtcccatggtcaatctgattctgtcagatcacaacaccatgattgttaaagaaaaaattattcaatgatacctgttaaaagcacaataaggaagactttattcagagccaacacgataggtgtaggggccatgacaatggggccttgcagtagggaagagaggctggctcagctccaaacacagcacaggaggttggggatccataaccaaaaagcagggtaaaggtgagtggatgcagtgttactaagaggaaatgtcagggtcaggagattctggctaaacccacctaacagagttcttgctgcaggcgggccagggtgaccgacatcacctgggaggtggtaaaggatgagggacccgatcagatatcaagggtgaccagatatcaaggatgggtggaggcacagttcttgctaaactgacttaacatggttatttgctgaaattggattttacaaagaagggcacagatgggactaggaggaggttgaagagcttaactaaatttgggccagcagagcaatcaggcaagataaataaaaggcaaaaaatcagtagcatttctatacactaacagcacccaagccatgagccaaatcaagaatgcaatcccattcacaattgccacaaaaagaataaaatatctaggaatacagctaaccagagaggtaaaagatctctacaatgagaattacaaaacactgcttgaagaaatcagagatgacacaaacaaatggaaaatcattccatgctcatggatagaagaatcgatatcgttaaaatggccatactgcccaaggca

SEQ ID NO: 94470 - DNA, 15338 bp, Homo sapiens
  misc_feature (1)...(15338): n = A,T,C or G
gagagatgaggcaggaagggactcgatggcaccgggtttactgagtatgcgttaggaggtttctcaggagacagctgtgtcagcggctggtgctcttgagaacttgtgatgtcatcagagagaaggacaagaatgtgagcccgtgagacacagcagagtaaggggcagacctgcaggcggcagggaccgatgccagtcagcagggaccctcagggtttgagagggagtctttcctaatgctggttttattcagcttgaggggctgcctttgtttttttgttgaacttcctatcttttttttaatattaaagcgtattttcctttacaaagtgatggtggccatagatgatagttgtatttgtcttttcacgaccttatttggctaaaatagttatcaaccctcttacggctctcaaaacatttttatttatttatttagtaaagacagggtctcgctctgttgcccaggctggtcttgaactcccggcctcaagcgatcctctggcctaggcctttcaaagtaccggatttacaggccagagccaccatgcccggccttcaaaaaaagttttggaacatttactgtaacctctgggagaaaatgtgagaaaggtgtggtggctgtcattagccagctgtttgtaggtcagggagacccctacccagtgtgtgcagaggggccagcccccatcagctggggaagcctggctgacacatctgggttgaacacaatagaaaacacagagccaacaagattcccggatagggagctgacggtgcagcagcctagctcaggagggacactggcacggcaccgtgtggactgggcccgcgtgggcacgaggaggggtcaggcctgggacctgagtcggggggtcaggcaggatgacagaacctgcagttaggttgtggcaaataaaggaggacccagttgtatccatgacaaagatgaggccgcgaggagggcgagtgggtttgggggcaggcagagtgccttggagaacttacaggtcctgccacaatcctaatgcaaggatggagctgcaagttcagtttgggaatcatcagcctggattggtttggtggaagccagggagtggttgagacccccacaggggagctctgaggaaggaagttccgaaggagggaacgtaagaaatgaccaggtcagaaccaagggtggtccagaagctaacccttagcttagggacagtttcacagagaacacgtccatgatgcaagactctgctgagggcctggagcagtgaagactggggcaaggtcaccctctgggaagtgaagtcaccagagaccttgcggagcagctttgagagttctctgagtaggaaggtaacagaatgtgaaggacactggagagaaggccaataggaagcaaacaaaaacaggccaaggaaacccagtacagggggctgcagggcccagggagtgggtccctcatctctcctccccacgcttggccaggtcyccacctcccgggagtgcgtgggctttgaggctgtgcaggaagtgccggtggggctggtgcagccggccagcgcaaccctgtacgactactacaaccccggtgagcactgcaggacaccctgaaattcaggagaactttggcataggtgccctcctatgggacaatggacaccggggtagtgagggggcagagagccctggggctccctgggactgaggaggcagaatggaggggcctgtgccctaactcctctctgttctccagagcgcagatgttctgtgttttacggggcaccaagtaagagcagactcttggccaccttgtgttctgctgaagtctgccagtgtgctgagggtgagactgagggcctggggcggggcagtggaggcgggatggccggggccccccccacactgtctgatgggttccccaacttcagggaagtgccctcgccagcgtcgcgccctggagcggggtctgcaggacgaggatggctacaggatgaagtttgcctgctactacccccgtgtggagtacggtcagtcttcccaccgaggccctggcctgaccctccctcggggaccggctgttttggtctctctgggtgtagcctgctcctcttacaggtcatgcacgcagcctgtttgctctgacaccaacttcctaccctctcagcctcaaagtaactcacctttcccccttctcctcaccccctcttaggcttccaggttaaggttctccgagaagacagcagagctgctttccgcctctttgagaccaagatcacccaagtcctgcacttcagtatgaagcaaaccggagaggcgggcagggctggggggagacagggaggctgaggtgtggccgaggacctgaccatctggaagtgtgaaaatccccttgggctgtcagaagccttgggcttggccataaatagggaggcagtggcacctctccatgggggtggcgaaggtggaatgagaggatctacacagagtccccagcctgggctcaccctgcaccttctcttcccctctgaccacttttgcgcacrtcatccccgcagccaaggatgtcaaggccgctgctaatcagatgcgcaacttcctggttcgagcctcctgccgccttcgcttggaacctgggaaagaatatttgatcatgggtctrgatggggccacctatgacctcgagggacagtgagtcatctggtcccctcagtctcttgtcctccccatgcctcgccacctaggccttgcccctcagaagccagatgcctgtgctctccgtttccacctgccatcctcccgagccctgctgactgcccctttgccccctgcagcccccagtacctgctggactcgaatagctggatcgaggagatgccctctgaacgcctgtgccggagcacccgccagcgggcagcctgtgcccagctcaacgacttcctccaggagtatggcactcaggggtgccaggtgtgagggctgccctcccacctccgctgggaggaacctgaacctgggaaccatgaagctggaagcactgctgtgtccgctttcatgaacacagcctgggaccagggcatattaaaggcttttggcagcaaagtgtcagtgttggcagcgaagtgtcagtgtgtgttgctagggctgagagcagtgcccctgcccgatgcagttctgggcaggccaggttgacataaccttagactctctgagccctgatgacccttgggctgttcagctctgctagaacctcccagatgacccgctaggagtctagtgcttcacaggaccaccccgagcagaactgggacccaagagcctgcaccccaaggaccagagtccatgccaagaccacccttcagcttccaaggccctccactgcccggctgtcgccagtcaccacggcctcagacagggcttgtgctcagctgacacctgtgacacagctcttctgcctcatgagctgttgtccagctacacctccccgactctgtcctcgtgctgctggcggttctgaggtctgcagattttagctgagttccgggctgttgaaagcctgctgacgcttggttctgttatcagtggaatgaggtgactttcccggagttgtgcaatcctcaggtccggcagtgtcttcttccagttactggtttcaaacaagccaaaagtctgactttggtgtgtttgtgaatcctctgaggaagccgctgttctcctggggtctccccttcccaccggacctgcctaactttcccccatttagtggcacacctggggtcttcagagatgactccgcgtctgtccaaagaagtttggtgagatcagtttccgtagaggtcatgacagttcagcagcctgccatccagtcattcgacagaaattcgggaatctttcacttcatgccatgccctgtgccaggtgccagagatacagctgctcactccagggctcatcgctggggagacagataagaggacgggcagtccccaccctctgtgaaagatgtgatgtcagggagcagtgtggtcctgtggggcatctaaccaagtcaggggcattgccaggcagggacagggaaggcttcctggagcaggtggcctccaagtggggctctgaagactgagaaggagccaggcaaagagcaggggtagatgagggcatctggggcagaaggagaatatacaaaggcccagaggccgggggcaggacagggtacctttggggacattgcatgtaattgaccacattcggagtttggatttggaagtggtggaagagatggagatggtgagacaagtagtaagcacgtcagccttccaggtgcgctcctttccgatgagcactgtcttatcccacgtaactttgagaagtttgggcctttcccactgtggcagaggtttcctgaggctcttgcatacatggccctatggttgctcatcagatctttctcccagtagctgctcagcatggtggtggcataagcccattttccggagccagggattcagttgcagcaagacatggcccggtctgggaggtcaaccatgaagaaggcagtagctgtcattgcccaaccccagaaatcccaatcctgttttctccctctcagtcctgatcatggattcagcagcagcgaactcgccaatgtagtgggtggcacagccagggtcttgactctggctctgcagtagcacagtctggaaaagctctgaggggagagagacccccactggtccgagggtctggcacagagccagaaatgggggggaaggtatggggctgggtcgcctctgacctctcaggtaccatccaggaggccctggcctctcactgaacccggccactcctctttggcatggcctcttcccaaatccccaaactgcctccttacccacaaaagtggtctctgagtgtcagtccagtgggacccccaccccttatggcttcagttccccaaatagggctggacccttgatcctgatccagctgtggctatccagccccttcctggggactttggactttgaggggggcatgcccagttgtgctgggaatccatactttccctggctggagtagaacctgtggactgtagtcctgagggcagtcatgttctgcctgtgcctggaaacacaagaaacttgactgcagagagaagaaagaggagagaggaacagagcgaggaaaccgcccgtctccggggctttttctgttccctatccttgactttctaagaccagtggggtcccctcctctgcttctttttcctgagttctgtgaaattccccaattcttattttttatctcaaaccagctcaaggtgggctgttttcctttcaaccaaagaaaggtgctcctggtggctaaaggtacatattcgacagctagatttccaggctggaatcctgccctccacaacatgcgaacaatacccgtgttgcatatagagcatggctgtgaagagttgagtgagtgcccacaaagcacttagagcagtgtctggtacatgctattactccgcagcgggaaaccacttcctcctttgtcttctgggcacttttgtgagtgaaaggaggcactaataacaatcacactgggatacctgtatatactggaatgccccaggcaaaccaggcttaaactgtattactctatctgtagcttaaactaacaaacaaacccacacaaatcacattttgttcttcaggcgattcaggaaggcctattaggcagggactgccattttctctctgagacaaacatcatgccagtaaactggcccacggtggggtggcagagggagagggcccaggtcggggcggacacccttgcctgcacgggtgatgtggaaccagaaagctgactctggatgcaggaaaaaggtcagggttgcatttcccttccttgcttctcgatgggtgattaattttttttgaaatacggacgtcccaaggccaatgagactggtgtcattccagaaaagggccactctgtgggtgggtcggtgggaaggyacctgagggtggggtcaagggaggccccaaaacagtctacacagcaggagggatggctggggctcttgagctataagtggcacctcagggccctgacgggcgtctygccatgctgctcctgggcctgctgctgctgctgcccctgctggctggcrcccgcctgctgtggaactggtgraagctccggagcctccacctcchgcctcttgcccygggcttcttgcacytgctgcagcccgacctcccmatctatctgcttggcctgactcagaaattcgggcccatctacaggctccwccttgrgctgcaaggtgagaggctgatctcgctctggccctcaccataggagggggcggaggtganggagagggtcctctctccgctgacgctgctttggctgtctcccagatgtggtggtgctgaactccwagaggaccattgaggaagccatggtcaaaaagtgggcagactttgctggcagacctgagccacttacctgtaagggcbgggggmattttttctttcttaaamaaatttttttttaaragatgggttcttgctatgytgcccaggctggtcttaaattcctagtctcaaatgatcctcccacctcagcctcaagtgtgagccayctttggggcatccccaatccaggtccctggaagctcttgggggggcatatctggtggggagaaagcaggggttgrggaggcmgaagaaggtcaggccctcrgctkccttsrtcagttcccaccctccagcccccavytcctcctgcagamaagctggtgtctargaactacccsgacctktccttgggagactactccctgctctggaaagcccacaagaagctcacccgctcagccctgctgctgggcatccgtgactccatggagccagtggtggagcagctgacccaggagttctgtgaggtaaggctgggctcctgaggccacctcgggtcagcctyncctctcacagtagcccccgccctgccbgctgcacagcggcctgctgaactcacactgtttctccacagcgcatgagagcccagcccggcacccctgtggccattgaggaggaattctctctcctcacctgcagcatcawctgttacctcaccttcgsagacaagatcaaggtgcctcacagcccctcaggcccacccccagcccctccctgagcctctccttgtcctgaactgaaagtactccmtcctttnctggcaggasgacaacttaatgcctgcctattacaaatgtatccaggaggtgttaaaaacctggagccactggtccatccaaattgtggacvtgattccctttctcagggtgaggacctggagcctagacacccctggrttgtrggggagaggctggggtggagggagaggctccttcccacagctgcattctcatgcttcctgccgcagttcttccccaatccaggtctccggaggytgaagcaggccatagagaagagggaycacatcgwggagawgcagctgaggcagcacaaggtggggactgtrygtggacggcctcccctcggcccacagccagtgatgctaccggcctcagcattgctatgaggcgggttcttttgcataccccagttatgggcctgttgccactctgtactcctctccccaggccagccgctcagccygctcctttcaccctctgcaggagagcctsgtggcaggccagtggagggacatgatggactacatgcycyaaggggtggcgcagcygascatggaagagggctcyggacagctcctggaagggcacbkgcacatggctgcagtggacctcctgatcdgtggcactgagaccacagcaaacaccctctcctgggccgtggtttttttgcttcaccaccctgaggtgcgtcctgsggacaagcaaaaggctccttcccagcaacctggccagggcggtgggcaccctcactcagctctgagcactgtgcrgctgrggctgtgcttgcctcaccggcactcaggctcactgggttgctgagggagcggctggaggctgggcagctgtgggctgctggggcaggactccacccgatcattccccagattcagcagygamtgyaggaggagctagaccacgaactgggccctggtgcctccagctcccgggtcccctacaaggaccrtgcayggctgcccttgctcaatgccaccatcgccgaggtgctgyrcctgyvgcccgttgtgcccttagccttgccccaccgcaccacacggcccagcaggtgactcccgagggttggggatgagtgaggaaagcccgagcccagggagrtcctggccagcctctaactccagcccccttcagcatctcyggctacgacatccctgagggcacagtcatcattccgaacctccaaggcgcccacctggatgagacggtctgggagaggccacatgagttctrgcctggtatgtggggggccgggggcctgccrtgaaaatgtggtggaggctggtccccgctgccgctgaacgcctccccacyyacctgtccacccgcccgsagatygcttcctggagccaggcaagaactccagagctctggccttcggctgcrgtgcccrcgtgtgcytgggcgagccgctggcgygcctggagctcttcgtggtgctgacccgactgctgcaggccttcacgctgctgycctccggggacgccctgccctccctgcagcccctgccccactgcagtgtcatcctcaagatgcagcctttccaagtgcggctgcagccccsggggatgggggcccacagcccrggccagarccagtgatggggcaggacyratgccagccgggtacctcagtttctcctttattgctccygtacgaacccctcccctcccccctgtaaacacagtgctgcgagatcgctggcagagaaggcttcctccagcggctgggtggtgaaggaccctggctcttctctcggggcgacccctcagtgctyggcagtcatactggggtgcgagagaggtgggcagcagctcagcctccccccgctggggagcgaaagtttcttggtctcagcttcatttccgtgaagggcaccgagaactcgaagcccttccagtggtaccagctcactccctgggaaaggggttgtcaagagagagtcaaagccggatgtcccatctgctcytcccrttccccttaaggaggtagctcccagcactcaaccaacctccccgcagagctcccttcctgaccctccgctgcagaggattgaggcttaattctgagctggycctttccagccaataaatcaactccagctccctctgcgaggctggcatgattgttccatttcacccagccactcagtcccttgcctgttacactgtggggctgaaacctaggcaggccgagccccagccaccccagctctgagccgcctccccacccctcacctgatggtccactgtgctcccgtagagcccgttgaggttggcgtagtggcagttcctgtaccaccaggcccctcggtaggagacagcgcaggagatgagcaagctgttggggtcccgatcacgggcagagaagacactgccgctgtggtagctcatggagtcccctgggcagggtggaggaaggagccatgagggcctcccctcccagcctcaccctcccagcctcacagcctctgcttacctgcggtgccgtggtagccctccaagtggaggcggtagtactccgcagccgagtctacgtggaaggagtcgtactgggcgaacacagcctcgtccccagcccgcaggtccacgcgcatggagtagtcacctgcctgtgtcaggctgtgcagggcctcattgcctgggggtgggatacgtgccctcatcagggtcctggtgtccacagggcccccatccccatccgtagttccccagtccctgtgaggcactgacccagccagaactctccagagatgttcccaaaaccatgggcatagtcctcccagtccctccagaagtctgtctgtccatccatgcggcgctggaacacctgggaagcaagtgggggcaccatcagcctctggctcccggggcaacagaccctgccctgcacagacccctgggcttcccaatgccacccaccagccagccgcccccatcagtctccatgtcgcaaaacacgttcaggggccgctcgcggttgccgttgaggaagatggtgctggtcctggaggcaccggctccgttctgcatctcctccccgcagtccctggggaaggggatccgcagcccacctgggagaggagagcaggggccagtccttttccaagccttaggccctggctgcccacccagcccccggccccgggcccgtgcgtccaggtacccgtggtgaaagaggtggacacgggcggcaggaggctctggccccacatggcctggagccgtgcattgtaggaggtggagggaaagaggccaaggagctggtgagatgtgatccctcctgggagcaggatctcctgtgggacagacaagggggggtcaggggagagggaggtggagaccctccgggagggccagaggcagcacctcctggaatcacccagggaggggagttgggtcagtggggccggggcacctggttctgtccaccaggggtgtggaagctgagcaggtagcctgcgggccggactgggggctcagtccaagtgagcagggcggtgcggggggtcacttccttggcctccaagtcccgaggggcctctagccctaggagggaaagcaggaagaggagatggggatgaggcccaacctggctccctctacctcctctccctgtcccacacaccccacagaccctacctgtggtgaaggtgatgctggctggggaagtgaggttggggccccgcaggccacgcactgtggcggtgtagttggtgtggaggacaaggtcatgcagggggtagtccaccgcgctgcctggggtctccgcctgcagaggcggggctgggagtgtagagaggggcatcaaggcctgccccctccatcctcggccagagtccagcctcccccctgcaatccccaccctgaacaagtcccctccagaggcctcaggcctgctcacccccaggggctgtgacctggacgtcataggtgtccacaggattctgggggggcttccagtgcagcacggcgaatccctcggtcaagttcagtgcacgcaactgtgtgggaccgtcaggaactgggggaaggggaggggctcagaagggtccccgcggctctctctactccgtgcctccccagactccactggcctcccgtccgcaatcggagcctccaccacctccctttcaccctcctcgttctctctcaactcccacccatgccgttttcttggctcccacctcttgccccgggtcccagtccatctcacccgtggtgaggaagcctgtgagaggctcactctcctcaaagcctcggaccgagaccacggtcacctcatagcgagcgcctgggatcagcccctggagtttctgggtccgggcctggccatccacctgcacactctgaggctcccctgaaaacattggggatcgagggttacccagggaaccccagggcggctggagggtgggcagagtgcaggggggagaggaaatgcgaggcgatgagcacatggcaaaggcaccacctccgtccgccagctggtaggagactttgaagctgtccgcccgggatggtgggggcatccagttgaccttggctgaggtctccctgatttcactgaattggaggtcacgggggctctccagaactgcagaggggtcaaggaacaatgacgcaggcaggggcagggaggcttctccctgcgagtccccccctcgcctctgctccagcacaggctcaccaccccttttcctctagtccccaggaatggaagtcgctctgcagattcctccaggcccaccaccaactcgcccacccccaccgctggctgaggcactaggtcccccccgtgaagtacaaagacccccactttggggcagagtgtgtgtgggtccttacctgggctgagggtgcgggcggttccctggatgctgtcggccttgtggggtcctcgcagcccatacagtgtcaggctgtacagagtcccggaacgcaggtcccggagcacggccgagtgccgcgtccccggcaccatcagctcgcgctgcagcagtggacgcggatgcggctccagagtgcttggtgatggaaccccaaagcggagcaggaaggagtcgaaggcccccggtggggcctcccagttgagcctcagtgaactggtggtcacgtcagtcacagacagctgggacaggcggggccttgactcctctgaggtctgaccagcaggagccagccctgcacggagtgggtgggggagaagggattggagacagaagcacaccagcttggtgacccagagcacgtcccttccacccccctccctgcccccgtttctctatctgtaaccagggacttgcagccacaggggggtcctgtggggcagagctaaaggccactcgcatccagcccatccatcctctctccctggtacccgcctcacgctctttccctgcgaccaccccttctgagcccccgtttctcccttctgagtcctaggctagaggccggagacgcctggtggtacctgtggtgccctcagctgagaggggccccaggcgcttcccttcatggaggccatagaggaggaacctgtagggggtgctgggctccaggcctgagatgaggatcttgctctggtcgccgtccacgagcaaggcctggggctgcccgttcgtgtcctcatactggaccacgaaggaatcaaaggggccctgggccacgctccacgagaggcgcatggagtctggggttgtgtcggtcacggtcagcactcctaggcggggctcttcaggaggctcaggggcctctggggctaactctggggctggtgtgtcctcttctggggctgcgtgggagaagcccaggggagaatctgagtgaggggcgccatggggtgctccatttttatcttccaggcttggcccaaggctgaggtgggaagtttataggtccaggcccagtcagacaatgaagtcgctgtggcctcgtgactcctgcgagctcccgcgctgtctgagtcaggtgctcgcttcccccttccacaccccggtgtcctgccgagcccacctcgagatatcacaggctctggccccacccatgccgggatacattcactgagcttgaggagtgtggtgctcccttctgagagaagctgagggtggaactggctggttgaggtgactggcaaatcccaccagccgtgccgtggtcaggcctgtctgaggtgggcatcagcgagctctggaagaggagcctgtaccacaaatgcagccactgctgttggtttctgtgtccccgctcattttgttttccagtgatgttcctcttaagaaaatgctcctgactcatccacggcagggaggtttgccgctatctggacaaggccacccttcggggaggcgacagcagccccagcgagtaatgaggagcagtggcagtgacggggcagagtcggggctgggagattagagagcccctcccagggcctttccctcccgcctggcctggctcctgctctggactccttgatggatgttgaagcccacagggctgcagactcctcctccttcctggggacaggccagggcgccccactccggcctgcccactcctgcagtcatctttgtcttcagcccaaatgcacaaggaaacccacacaagctggcttgctatagccaggcacagcagcctcacctgtcattcccagggcagagaccgggcccaggcgctttcccccaaggagcccgtagagcagaaacttgtatttcttgccaggctccaggtcctctacggtgactgtgcgctggtctgcggccacaggcactgccctgggctgcccgtccgtgtccctgtactggaccacgaaggagtcaaaggggccctgggctaccgtccaggacaggcgcagagagctggaggtctcctcagccacggtcagttcccccaggtggggaggtagctccttctccaggggagctgtgcagagggaggagggaaagctcttagtcacatgctgcctttgcctaagccctggcagcctcccggaggtgtgaggttctgggaaatggtccctccagtgtagccccagggacagctccttgaggagacacacaggcctgctcccgccatgccccacaggaatgagggagaacagccccctcctcctctggaggctgctgcccaaactccttcctgccccgccccttccctgctgtgatcgaggatgcgccaaattcattacagatcatctcccgagggatgggtggctgggggtgcagagagggcctttgtttaccctgacccccagcccctgagcaagaatgaggccagagctgagagagactccccggaggtctctgggttgtcacggagacaccccaaacatcgagagctggtctgggcagccggccaatgcacggctcccatcactgccaggctgtgatctcccccttgtccccttgtggccatcagcctgaacatccgtgcctcctgcttccccagccccacactgaccccactgggccggggcagccagggtggggcagggagaagacaggggattagctgggagaacagagggcagagcagaggcttgcccgggtggggctggggccgatgggtggggatctgtaccccgtccccacagtgagggtttgggaagagaattacggagtcccagggacccaggcccagactggccggctgctctgtcctcctctgggcatagtgactcatggtcctgggagtggggtgagggtcggtgacccaccacaccccttcctcagggagctgagtcataggcatagtgacaccaggtttttccatcgtctttccatagccaagccctcccttttcttccacccctcggctccgagtcagggaggagggaggaggatgggaaccactactgagtccagcgccattcccagcattatgcaggtgaggacactgaggtcccggggatgaagcggcttgtccatggtcaccctggcaaaggctaggactggaactggaacacagatctgctggccccaaagcccgtgtcccttttatttcctcagcagtcagcgaatgaaaggaagtaatgcatatgcttcagaactgtgcctgacacacagagggactcactttcggagttaagatggttgtgtcagggctgatag

SEQ ID NO: 94471 - DNA, 28622 bp, Homo sapiens
aaaaaatcagagatggacacttaggggaagggaggagaaaaagcaaggagggaaggcagaggcggaatggttagaggtctgtgtgtgtgtcgggggaagggaggtaatacgttcttgaacctgggtatgtggggaattcagggtcaagggacaaacatgggagggcttagagaggcagaatactgtgaaaatgccattgatttgggatctgggtaattggttgccatttgagagggaggtttcaggagaatagggtgtggatgcatattccaataagtcaagaaatagtgggtatgaaaaaaagacagatacagacatatctctgatagcaatattccgcacccccctgcccctttttttttgagatggagtttcgctcttgttgcccaggctggagtgcaatgacttgatcttggctcactgcaacctccgcctcccaagttcaagcgattctcctgcctcagccttccaagtagctgggactgcaggtgcccgtcaccatgcccggctaatttattatttttagtacagatggggtttcaccatgttggccaggctggtcccgaactcctgacctcaagtgatccgcctgccttggcctcccaaagtgctggaattacaggtgttagccaccgtgcccagccgtgaattctgtttttcaagaagtttggtaaggtaggcacattaaatgcgaaacatccaagggcgaacccatgatattcacacctcaccccaccctcctcccacatctcctatcacatttcctatctcagtgcatggcttcccttctagattgtaagctccatgaggtcaggggtcacacctgctgtctgggtggatgtctcaccagcatccagcatggagtctgcatgttgcataaatgcataaattaggttaggaccctgtcctgtgggtgtacaaccaaagacccaagcccactgctggcagcatcccctaatcaccactcccctcagaaaagaggcctattggttgacctcaggataggagagggcaactagtcccagggagacttgagaggccattgacctcctccctgggctcccacagcaatctgctctctttgcctttcctataccccctacagtccagcatgtggggctctaatccaagttatctgccaccctccagcccacagtcaggaacagctatgggcagctggcatctcttcttggcccccatcactctatccttgaccagcttcttcaccatggtctgccctctctgttctcttgtcttcctggagttctggggatagtagggaatggaaaaggggtactggggaaataaagcctcactaagaaaataaagcctcactgagaatggaccccaaggtcttccttggtggattcccagggagctcccctccgtcccccatattcacgtgtctctctggcgatctgggaatctgtgtccctcacgttagtctctgtcgggttttctttttttttccttggaagaggagatgaagggaagtgaaaggcggaatcaaaagtggggagggtctttgcggggccgcagtctttggaattgcgggcgataaatcaactaagtctctttaatattgtctttcagaagttcacacacactcacacacagatcagaacaaggcggggccgccgaggggagcggggagcggggacttgggaggtccatagcctggattcccttctgcccggctgcccaggggctgggatgggtggaagggagtatttacagagcgtttacaggcaggtttcttatcccagggagaagggtcctacaccaggaacttcccaaatgtccttaaaaaaagcaaaaggaaaggttctgggattagcaagaaaataggcagatacctgggtggaggagggacaaaaatgtacttgcaaaaaacaggagtgtgggggccttactaccccagggctcggtccttttgccggaagaaagggaggggtctgtccgtctgtgggcgaggcctggagccacaaacccaatcactggactgaatcaccccgcggagaagaaaagaaggcggagcctgccgacctggaggcggggttttgtcagagctggggcggtgcttatagaggaggcggggttttagggaccaaaccgaggttgctcggttgggggcgctacactttgagggtgagggggcctggagcgactgagggtccggcgtttggccgggatcccggaaagcggcgtccctgggggtgtgggttttggaggggttcctgaggaactggattccgagcttgctcgcaaggcgagacgttccgtggaggcggagtttacgatgtatccaagtctgacggccccagaaacgggtgtgcagggcgcccattgggtccgcggtatgactgcagaaagagcctgggagatcgaggggcgcagagtggggccggaccaggggcgtttttagggatcccagtagttctcgtggtgctgcgcggcgatgatgatgactacggtgaggatggtacagagcaccatggccgcgatgcccacggccagggagatgaaggagaagttccgggcctcgcgtgaagcgatctcggccgacaccatgtctccgcgggccaaggccgtgcgcacctacggaggaggggtgggggaaggaggtcaaagagctgcggcctcgttcgaacgcctcagcctttctctaagatggtccccagaacgcccagaactccctgtccccgcccccaaaccgagtatgcccctgccccctacctgcacggccttgaagatggcaatgatgccagtaggccagaagcaacagatggtggtcagcaccgcgatgggcatgtagtcgtgtggcgggcgcctcggctccagtagggccagccctgggccctggggcggcggggggagagtggaggtcactcctgttccccccggggtcccgcctgcatatggctgtggaaggaaatttggggggcaggggcatcactctgaccctctcccagcctaccagcgttgggcggctggcagagtggctttaaaagcacaatttttacctatggcttctcaaaataaagcacccattacccttccaggacacccataaattccacctaagcccctctcctcccttccttgcttcattaaccaccatattcttgggctttctacattctctcccgcaaggtatggtcccactggggctgtcctggcctcaggtcagaccttctttcttccctccagacacctaccaggcctcccctacccccttagtcccaggcttctcccacatccctcttggttcccagcttccattccccccgtcccccgccaggcggtttcctactttcagacctcctctgaacctctaggctccgatccccctcccaggccctgactctgggcaccagtagactcctactcccgtgtctctccctagtccttcctgtctcaggctcccttctttctagggcttgtcccgggaacactacctgttccctgcccttgttcctctatcctaccagcccccagcgtatccccaatttcaagtcctgtatcgcgtccccctctttcccatgtccctgtctgcccggcactcaccgtgcccaccgggtagaccggcacgtaagcagtgcaaggctgcagctgcagggggtatccgggcgctacgtagccccccagcggcagcgtgcccacagtccccgcgtgcgtgggcaccacgaagccaggggcctgggcagtctgggctggcgccggcgggggcggggcggcggcagcgggcggcggcgggggaagtgggccctcgaagcgagtctcctgcaggtaagggtcgggtggcatgcggggcaaggtagcgcagccgggtgggggtgccccggcagcagggccgggaggggcgtggtgggggggcctcggcagcgtggcagaggaggagggaccgcgctgagcggtggccgcggaagaggccaggccccctgcccctaagcgcgggagggtggcggtgccagactgatggtagtggtggtggtggtgatggtgtgaggaaggggctgcctgtggcggtggggctgggggttcggctggaggctgaggggcattgtagggcggcggagaagtgtgagggactgagtctgggagtcctgggggaggtgagtggaggagagtataagaggaaagatgacacagtgatgagttgaggagggggtaaggggaaacacagccggtcagggatggagaaagataatgggagagacacatagagagagacgggtgagaaaccatctctaatttgaggggcaagagaggggctgtatctaggccatctgcccccctccttcttccttccaatctagttttgaggtcacaactctggtctgcttcttttctgtctttttcatcaccatgcacccagctctcacctgcagacctaatcccctctcctttgctatagctgcctttgggctggcctatccgagctagtcctgtgtgtgcgtatgcgtagacatgcaaccctgtgttaatatgtgctcaattcaacagttgtataaacacatgtgggatgacatgtgttccactctgctgttccttcagtggggggaggagtgccccagcctctgtgagaatctcgggacctcttttagggcagattaagaagagccctctggattttgctcccttgacaacccccatctggtcatgtctccatatttcctcacaggatgtctccatgccagccagtgattgtccatctgtcactcccaatgatgccatccctgcaaaacctggctgtacctccttcaccctctcaacctacccccctgaccatgttgttggcaaggggcagaggctgccactggaaagaggaaaggaagagaaagggggagacagaaagaggagggggactgggggagtgttgagagctggagagaaggggaatgaaatagaaccacagctgaggaggggtaagggagggggttggggcaagggggacggagagtctggagacagtggagggggtgggaggttttgttattgtttttacctgacttttcggatgacatgcctgcggtctcgctgggacagggtccctgcagccggagtgggggtcctcggccggtgctggagtctgggtgctggatggcgcagcggcagcagcgcagagatggagagatgaaggcagcggcggggggggggggcggggggggcgggcggagggagagcggggagggggggagcttaaagggaccgaggcgagggagggggagcgcttcagatgtttcccactcggtctctctctgctctcggaccacctctctcctcctcttaccccggcattcaagcccccagtttgggctcctttggagttgtcatggaaacacggaggctagaccaggcgaggcgggtgggactaaggaaaggaaggaaggagaactctctggagtctcccccaccaagactcagtgattgtattgtgggaggaagtgaacaggttctcagtggagttaataacccaggtgcctccagaggcaggtcgtctccccctcttagctccctgcaaggtgccagggtcttctcccaaatccttggccccagtttcctcctctttagaagagataaatacttgtgtgtgagagagaattgtgcagagttcagaactgcgatggtctgaaaagttcccagggtttggtgaacctaccaacctagcagtaaagagggaggcccaggtctgtaaatcagggggagctgggccttggagggaaaagggagagagagtttgggcggtgtgcatacataccttcttcgtccaggactaaggagctgaagctcttttggagggggtagggggtatgacttaactgctcatttctggcagctctgttggtaatgtgtgcttgttcccccactttccctttgcttttgaggctgcttagagtctctgggctggtcaatgttcagatccattccctaaacccccctactcccacccaccacctcccaccaagacgcatctccagctcctgagtcgacctgcagtacagcgttattagtctttttatttgcttattgcatcttgggagcgcgtgggtgggtgaagggagcgaggataggaagtctatggagatttacaccagtttttttttttttttaaacaaaaacacagccagataatyatwattcttcccttacgtccccccagcccccacctggggcagtcgctctcccggctgcgtcccttttcgtccatgtcctagcagagactacagagcagtacagaggctctcgctgaaaccagtcccaggctccacagagtcagatcacggcttcacaccagtcgttctggtcacttaggcgttcgcgtgagcgctcaaccccttaccgccacctcatcgtcactctacaccattctgagcgcaaaaatgttttgattgagacaaatttagaccaagcaatgaccttgtaaacagagagaggggctcagacatgctgagaaatccttatctctagagaaacgtctttaaatgctaagtaaaagccctagcaagtaaaagccctgaggcactagggtgtcggttaggggtcacaggcggagaggtggggcgcctgggggtttcggtagggagccacccacagataactcagacagccagattctgggggtcgttcaggttgaaagactggtcgaaattacgcgggcatgagtcagcgcatccctacgcgccctccgccccttgagggtgggtcgcttatagggaggggagtagagtagggcaggagaaactgggccaggctgcacttagctcaaggggcctcgaggactctctgcgtctctggagacaagggcactacacgcacttcagaatgaagagttgtaagtcgctgacctggggcggactggagggtggggtggggtgggtgttgaggggcacgcccgggctggcatcagccctccaggccaccctgccactcacccagcacacggcaaaatgcagaggactacctttccctggtccgccccctggccgccccttggggaatgcaaacttcgtgtyctgctgcggagccagackcctgtattgggaagtggggagaatcaaggcggggaaatcggactttygggtcgctgggggcaacgaagcctggagaggccttctttccattcccagaatatgtttgctgctttttcctctccccactggcctaaatggatcgctccgcctgtttcctccccagcacctagggcgcaatggaatattccattgcccctcctgtcctgggtctgtgttgcggggaacgctcgcgcggttgccagagaaagccccggacgtgacggatttgcgcgaccccaagcagcccgcccttccccctcccatccgtcattcccctgcgytctctttcctcacccttccccccgccaccgtgggttccagacttgggataagtaaacagcgggtggagcgaggcctacggacccaggccaggtgggagtctgcactcttcaaggggcctgggctgctgctcacgggtattaaagaactccgcgttgttcatggctgaggcgatgcattaggaagatcctggacctagagaacaagtcccccgaacgctgagttggaggcgggacttcgggtgcgcgttggtgcgtcaacgtggtgggggggtgtgtttgtagggagagggctggagtaagttaaaagtaggctattttgtgacacggacctggtgtgggagcgagaggaggtggcttgattgccgggcgtctgttccgagggaggagggtgttgccatctccctcacatgcccttatcacccctttctcaggcgggagcatgctggggctctgsgggcagcggctccccgcggcgtgggtcctgcttctgttgcctttcctgccgctgctgctgcttgcagcccccgcgccccaccgcgmgtcctacaagccggtcatcgtggtgcatgggctcttcgacagctcgtacagcttccgccacctgctggaatacatcaatgaggtctggcaggggacacctgggtgcagggcgttagaggcgtctactgtggcaggggagggagagcggggaactgaaagccacccctctgggcctgcccagttcctcagggagctggtgctggcgtgggggagagttgggggacgggatccctggttctagcagggtacaatagacctgtggacgcgggccagggggtggcgtgtgggagcttcttagcctatccccggtggctgcattgcccccttcccacagacacaccccgggactgtggtgacagtgctcgatctcttcgatgggagagagagcttgcgacccctgtgggaacaggtgcaagggttccgagaggctgtggtccccatcatggcaaaggcccctcaaggggtgcatctcatctgctactcgcagggtaggcgactcccctgcccctaactcctaagccctatctgaggcttgatccttatctgagggacacttcctagcgtccctttttctgaaccacattgctccaggcacaaccctggtacctgagcccttcctttctgacttccctcagcacctgggtctcatctctgtcttgaatgggagggaggctccctacactgctgcccttttgcttcctgttacccatggttcttggacataagggctaatggggcaggtaaaaacatcctagaactagaggcaggaggcccagcatctaattcgggctcagtcacttatatgatgtgtgaccttttggcacagggtgtgcctgccttctgtaagcctcagtctcctttgtgtacagtgtgtgtctgtgtgtgtctctgtgtgtgtgtgtgtgtgtgtgtgtgtgtgtgtgtgtggtgggggtggggggtgctgctggctttgctgtccttaagtgcctgcccaatgtggtgttctgcttacagggggccttgtgtgccgggctctgctttctgtcatggatgatcacaacgtggattctttcatctccctctcctctccacagatgggacagtatggaggtgagtgggcactagactccatagaatgccctgagttttgggggaacagaggtttatggtcacttagcattgccattcrcttgccagacacggactacttgaagtggctgttccccacctccatgcggtctaacctctatcggatctgctatagcccctggggccaggaattctccatctgcaactactggcatggtgagtggggatgctgaactggggcttccatggatcaggtcagttgcttccacctctgctacaaccaatagcagtgatgacaataaagataacttacatttattgagttatttgaacaggctctgttcagaattttttttttttttgagacggagtcttgttctgttgcccaggctggagtgcagtgcaccatctcggctcactgcaacctccgcctcccaggttcaagtgatcctcctgcctcagtccccctagtagctgggattacaggcaggcgccatcatgcccggctaagttttgtattttaagtagagatggagtttcgccatgttggccaggctggtctcgaactcctgacctcaggtgatccactcgcctcggcctcccaaagtgctgggattacaggtgtgaaccattgcacctggcccagaatgttttaagtgtgtcaccttattgccttagaaggtttagtctgatgtgggagtcagcaaaccttgtctataaagggccagagagtaaatatttttgactttgtaggacatatagtctgtttcacaactcctcaattctgctgttgtagtgtgaaagcagccatgtaccatatgtgaatgaatgtgcctgtgttccagtaaaacttcatttacaaaaacaagtagcaggctggatttggtcctttggtcacagtttgccaacytctagaccagaccatggggccagaatacttgggtttgaatcttgaccctattgggtgcctttgggcaagttacttaaccattctgttactcagwtttccttatctgtaaaatattatagcatgtacttcaccaggtggttgtaaggattaaataaataaatgaatgcaatgtactttgaatagtacctggctcatatagtagatactagatagaagtacttgctattgccaggtgtggtggctcacacctgtaatcccaatatcttggcagggggaggtgggcgcatcacctgaggtcgggttcgagaccagcctggccaacatggtgaaaccccatctctactaaaaatacaaaaaaaatttagctgaatgtgggcacacgcttgtaatcccagctactcaggatgctgagtcaggagaattgcttgaacccgggaggcagatgttgcagtgagcggagatcctgccactgcacttcagcctgggtgacggagtgagatttcatctaaaaaaaaaaaagtacttgttactatgtttacggttgttatcactactattattattttgagatggagtctcactgtgtctcccaggatggagtgcagtggtgcagtctcggctcactgtaacctccacctcctgggttcaagtgattccagcgccccgagtaactgggattacaggcatgcaccaccacgcctggctaacttttgtatttttagtagagacagggtttcgccatgttagccaggctggtctcaaactcccgacttcaagtgatccacctgcctctacctcccaaagtgctgggattacaggtgtgagccaccgcacctggcctacattatcactactattttattactatccaccttgactattgctgcagcttccttattgggcttttcaccaccagtcttgcctcccttttctgcttctttttctaactgctgtttgtacccagatccccaccacgatgacttgtacctcaatgccagcagcttcctggccctgatcaatggggaaagagaccatcccaatgccacaggtgagaattcaggctcctacctgtgttgctttttctgcttctttgactccctatgtctccctctccaacctggcctgacccctgtggctgactcagcctctcttcttcccatcctacagtatggcggaagaactttctgcgtgtgggccacctggtgctgattgggggccctgatgatggtgttattactccctggcagtccaggtaataagggattttgtggcctgaagattggctaaagacatcccccaaccccagttggtctttatctcatgcctaaactggcctgctccttccactgttcagttagtgctcctccccccattcatcatgtcacccaagaccaaaacctgggagtcatatcccaaccccttgtatcaagccagtcactaagtcctgctgactcttctcctctccatccctatcaccccctcccccactttataaaaacttttaattttgaaattcttatagattcataggaaattgcaaagatagtatagcraggcccttcacccagcttcccccagtggttgcatcctatgtaattatagcacagtatcaaaaccaggaaattcacattggttcaatgtgtgtgtgtagttttataccattttatcacatttcctaccacctctttacttacctggactattataacagcctccagctttgtcccctccatcctattccttagaaaaaaatccatggctccatggtactatgtgcttgcctgtgttataggtcaccatgtgtgatctgtaatgtcacctgagctacttgaattgctcaacaaatatttattcaacattatgggcgcaggcttgttctgggccctagggatgcagtggtaaataaaagagaagtccctaatgttatgtagcttatattctagtttgtaagatagctgatacatacatacaaatatatatgtcaggtaataaggcaggggaaaggattagaggatgtccggggcctagtttcaatagtggccgaagaagtcctcctggaaaagtcaccattcaattagagactgaaggaagtgaaggagggagttgtgctctgggtggaagaaccccccagggagaaggtctggcacctgcagaggccctgaagcacgtgtgagcaataaggaggccagcatggctagtgcacaaggagctggggagaggacaggagaggagctaaaagtggtagcaggggaccaggcatgtcaaaccttagcaggtcaaggtaaggcccttgatatttttttttcttttttttgtgataaaatatacataacataaaattgccattttaaccatttaaaaatgtacagttttgtggcattaagtatactcacatcattgtaaaaccatcacccatcagcaccatccatctccagaacttctttttccccaaactgaaaccgtatacccattaaaaaatagactgggtgtggtggctcacgcctgtaatcccagcactttgggaggccgaggcagtggatcacctgaggtcgggagttcgagactagcccgaccaacatggagaaaccctgtctgtactaaaaatacaaaactagctgggtgtggtgatgcatgcatgtaatcccagctacttgggaggctgaggcaggagaatcgcttgaacctgggaggcagaggttgcagtgagctgagattgcgccattgcactccagcctgggcaacaagagcgaaactccatctcaaaaaaaaaaaaaaaaaaaaaatatatatatatatatatatatcctcatccctatttcccgacagtcccggtaaccaggcttttgatttttttttttaaattctgagtgagatgggaaggcactggacagttttcagtgaaggcaggacatctcttaaaatattgtaataatataatagtaagtgatgagttttatgtacatcatgtcatttcacatctaccacaaccctatgaatgacagtgatagctcatggttatataacatttttaatgttccaagtcactgtttcttccttttttttttttttgagacagagttttgttcttgtcgcccaggctagagtgtaatagcacaatctcggctcactgcaacctccgcctcctgggttcaagccattctcctgcctcacctcccaagtggctgggactacaggtgcccaccaccatgcctggctaatttttagtatttctggtagagacggggtttcactgtgttagccaggatggtctcgatctcctgaccttgtgatccgcctgcttcggcctcccaaagtgttgggattacaggcgtgagccactgcgcctggccaatatatatctctctctatatatagatagatatatattttttgagttggagtcttcgctcggtcgcccaggctggagtgcagtggcgtgatctcggctcactgcaagctctgcctcccaggttcacgccattctcctgcctcagcctcctgagtcgctgggactacaggcacccgccaccacgcccggctaatttttttgtatttttagtagagacggggtttcactgtgttagccaggatggtttcgatctcctgacctcgtgatccacccgcctcggcctcccaaagtgctaggattataggcgtgagcccacgcacccggccttgcctggccaatattttttaattaaaagattttaactccatctggctgggtgcggtggctcacgcctataatcccagcactttgggaagccgaggcgggtggatcacctgaggtcaggagttcgagaacagctggctaacattgagaaaccccatctctactaaaaayacaaaaattagtgggcctggtggcgcacgcctgtagttccagctactcaggaggctgaggcaggagaacttgaaaccaggaggcggaggttgcaatgagccgacagggtgccactgcactccagcctgggtgacagagcaaggctctgtctcaaaaaaaaaagaaaaaaaggattttaagacctttctattttgaaataatttcatacttaagaaaagtttgcgcctgtaatcctagcactttgggaggccgaggcatgagcccaggggtttgagaccagcctgggcaacatggcaaaaccctgtctttacctaaaatacaaaaattagctgggcgtggtggtgtgcccttgtagtcccagctacttgggaggctgaggtacgagaattgcttgagcctaggaggccaaggctgcagtgagccgagatctcaccattgcactcctgcctgggtgacagagtaagaccctgtctcaaaaaaaaaaaaaaaagttaccaaaatagcaaaaagcagtcatttatactcctcacctagatttcgcaaatgttaacattttgtcatgtttacattaatatcttttttctctaaatatatatacatttatttatatacgttaatgttatatttaaatataaacatagattcaaattttcctgaatatgcgctcacagattattcaaatttttccaactgtccttacagaaaaaaatatacagtggaagatccaaatcaggatcttgagttgcatgatcttgttacgtctctttagtatctttttgtttgtttgtttgtttgagttggagtttcactcttgttgcccaggctggagtgcaatggcaaatctcggcccactgcaacctccgcctgccaggttcaagtgattctcctgtcttagcctcctgagtagctgggattataggcgcccaccaccatgcccaactaattttgtatttttagtagagacggggtttctccatgttggccaggctggtcttgaactcctgacctcaggtgatccaccctccttggtctcccaaagtgctgggattacaggcatgagccaccacacctggcctyttttttttttttttttgagacaaagtctcactctgtcgccaggctggagtgcagtggcgccatcccggctcactgcaacctttgcgtcccagaatcaagcaattctcctgcctctgcctcctgagtagctgggattacaggcgyccaccacgcccagctaattttgtatttttagtagagacrgggtttctccgtgttggccaggctggtctcgaattcctgacctcagatgatccaccctcctcggcctcccaaagtgctgggattacaggcttgagccaccacgcccagctaattttgtatttttagtagagatggggtttcaccacgttggccaggctggtcttgaactcccgacctcaggtgatccgccggccttggcctcccaaagtgctgggattacaggtgtgagccacctcgcccggccagtaatgcatttttgatggggtttctacagaagtgaggtcgtatcttcagtgtatcacctcatgaagtacattatatccagtaaggtagttttgagtgtcctccctgctacctgtctccccagtaggccttgggttcctttgggaccttagcccaccttgatttcttcctttcttttttccttttcttttttctttcctttttcctttcctttcctttttgagatggggtcccgctctgtcacccaggctgaagtgcagtggtgcgatctcgactcaatgcaacctccacctcccgggttcaagtaattatcctgcctcagcctcttgggtagctgggcttgcaggcatctgccaccatgcccagctaatttttgtatttttagtagagatggggtttcaccattttggtcaggctggtcttgaactcctggcctcaggtgatttgccctccttggcctcccaaagtgctgcaattacaggcgtgtgccactgcgcccggccagattttctccagctcttctgataacctccccscaaatctctttgtagcttctttggtttctatgatgcaaatgagaccgtcctggagatggaggagcaactggtgagccccctgggattacttccccttctagccgctgtcccaccttattccagagccctctctgtgactcctgagctgaagggttcaccctgtggggaggaggtccaggatcccagcagtaactcactttgtctctccttgtgtctctcttccatrcttccacgccccttcgaccaccttgaaggtttatctgcgggattcttttgggttgaagactctattggcccggggggccatagtgaggtgtccaatggccggtatctcccacacagcctggcactccaaccgtaccctttatgagacctgcattgaaccttggctctcctgaggatatattcaggggtccccaggaactcctcggtccagagaccaagtggtggccttggaaagcagatgtcaggctttggtgtgcctgtgaccacctcattgctcccatattatcccccatttttagtagagacggggttttagtagagacttggcctcccagaacccccttcctctgctcctccatgaatgacaattccaggcctccccsacctcatgtcctctcatttgggggattgctccgtgctgtccctttctctcaaggccgaagttgggaagtgagaaaccatgtttttaacttgtggctgcttttgctgctgctrctcctccgtatctggctgtatgggtggagaacccaccccctgcccaccacaggggtctccttccaggccactcaggacatttttagcttctctcctccccatgttcccttttttctctaaagtcycctgacatcagccctcccaactcctaagagggactacccatgagagtggggtthtgaggctcccctatggggacagttccgttcttgaagtgtcagtgttggggaatatctgtggcctatgaggcccatctcaggtttggggatcccccagtccctatgatcagtgttggagtacccccctgggagagcctagtttctttgaggccccaggccctcttttaactacctttgaataggtgttatccctgtatttatggaaataaagttccatttcctcagtgtgacttggctcatttccaggtggaggggacctggctccccaaggagggtgggggyggagcctgaggcctgggtgcccagatgcctggtctagggtggggacccccttggtgtttccgctctctctcaatgcccattctttgtgggttcctggttctctgcgggttctttcctgctgaagacaattctcttcctctcccagtccccaagactggggggttaagctcagggctccagtggtttgggcctcagcctcatgggtggaatgcgcctgccacccccaggctagacgagggggcagagggtcagggtgggcattcgttgtgccgcttttgagctttgtgggccagagctgggtgtagggctggacaatgagcctcctcttccttgaaagaaggaattttggctgagacaatagggccctgtctgttctggcatggggggtggtggctgactcaattctgttccccctaagccctaacaaatgtcatgaagagaggggggcagttttccccttgstgccctgggctgcccccctgcccctttgtgacgacttgcccttctagctttcctcagctgatcttgctttttctcccataacctgaactgctttgttccctgcagctggttctctccctgccccctaactctcccctagtctgttttgggttcaagggggtactggtggtgttacagagctcatagcttctgatctggggagtccagaaataggggcctcagagggttggaaagatacttctagggagccctttgctgggrtggggatgagggtagtgggacttgaccctactgagctgaccctgctggagctaaggaggaggcttgtgggagggggcaggaatgggaggactctctggcccagcccctcctctccttcttagcctgccaggcccacccaccagtctgagctgcttctgctgaggctggtctgcttgaagcctcccaggagaaagaagccaggtgggaatggagagagagaggaaggcaagtggggagagaatttcaaatggggaaagagtggggtttactcagagccttagggtgggcatgagttgcggggtgttttgttggagcaagggatgtgcatttagggcgttatgtgacggtgtgggtatrtgaggggagtagcagtgtgtgaaaggtgtggagtttccaggtgcttggtttgtgtgtacggtgtgaaggtatatagctaggggttttttttgtttgtttgttttgtttgtttttttgagacggagtcttgctctgtygcccaggctagagtgcagtggcatgatcttggttcactgcaacctctgcctccagggttcaagggattctcctgcctcagcttcccgagtagctgggattacaggcgtccaccactgcgcctggctaattttttgtattttttagtagagatggggtttcaccatcttggccaggctggtctcgaactcctgacctcatgatccacccacctcagcctcccaaagtgctgggattacaggtgtgagccaccgcgcccaaccagctagggttttgaaggtatgaagttataagagggcatgttaaagacaggagggttggccaggcatggtggctcacacctgtaatcccagcactttgggaggccaaggcaggcggatcacctgaagtcgggagttcgagaccagcctgaccaacatggagaaaccccgtctctactaaaaatacaaaacaaaattagccgggcgtggtggcaggcgcctgtagtcccagctactcgggaggctgaggcaggagaatggcatgaacccgggaggcggagcttgcagcaagccgagatcgcaccactgcactccagccagggtgacagcgagactccgtctcaaaaaacaacaacaaaaaaaaaaccaaaaaaaaaaaaccctagctatataccctcacaccctacaaaacaaaacaaaacaaaattagccaggcgtggtggcgcatgcctgtaatcccagctatttgggaggctgaggcaggagaatcacttgaacctggggggcggaggtcgtgcggtgaggcaagaacatgccattgcattccagcctgggtagtaagagcgaaactccttctcaaaaacaaaaacaaaaaaaaacccaaaaaaagacaggagggtcataaggggagggttgactgtgtgtccctccaggttgtgcagaggggattagaagtaagtaggttagaggggaggtggagggagtgtgctggggtgtgagcttttatgatgctgaaaggatcatgatatgctaaggacaggatagtgttgggttgtacacacaggtgtaggcaatcctggtggctagtatgtaaaagtgaatgtcctgactcccttagagggtacctgcagagtgcccttggagggactagtgctggagaaattaataggagaggggacgggcatccattaaccttttcttgcctgcagcctgtagggtccagcgtcaaagcgaatcatggggtccagggctgagctgtgcactctcttaggcggattctccttcctcctgctactgataccaggcgagggggccaagggtggatccctcagagagaggtgacaacagagggggtagggcccggggtgagctcttctcaggagccttctgctgggggtggggcttcacaggaggcaaaacataactgtaagtttagaatgggggtgagaggctgtcatctggagggagagcggggggcctcagtagcctcttgagggaagtgggactcctggctccccagggcctggcctactcaatctctcccacctcatcctctggcatggacgcagtcagggagtctgctccaagcagacactggtggtcccgctccactacaacgagtcctacagccaaccagtgtacaagccctacctgaccttgtgcgctgggaggcgcatctgcagcacttacaggtgagggatggggagatgggaccccaagaaccccaactaggacccgtactcagggtcctgagccgggcgctgtgttccaggaccatgtaccgcgttatgtggcgggaggtgargcgggaggttcagcagacccatgcagtgtgctgccagggctggaagaagcggcacccgggggcgctcacctgtgaaggtgaggctgggtcttccgggccttgcgggaggcgcgccccacggagctggggagctgggtcgtcggttygagtctgaaccccacttcctctgtcctcagccatctgcgccaagccttgcctgaacggaggcgtctgcgttaggcctgaccagtgcgagtgcgcccccggctggggagggaagcactgtcatgtgggtgagtcagcttgtcctccccacctacccaggtgcttgccccygcyccctctctcagccccttccttttttcggtaactagacgtggatgaatgtaggaccagcatcaccctctgctcgcaccattgttttaatacggcaggcagcttcacctgcggctgcccccatgacctagtgctaggcgtggacgggcgcacctgcatggaggggtccccagagcccccaaccagtgccagcatactcagcgtggccggtgagtgggcaggagtacgggccacccgagggactcgggacgggcgtccgggctcgggtagtggtcacactcttggtctcctttgtccctagttcgggaggmrgaaaaagatgagcgcgctctgaagcaggagattcacgagctgcgagggcgcctggagcggctggagcaggtgagccaagcctgctgggtggggcgaggccagacgtcactgtcaataccctgaggsatctcttcctttctagtgggccggtcaggctggggcctgggtcagagcggtgctgcccgtgccgcctgaagagctgcagccagaacaggtggctgagctgtggggccggggtgaccggatcgaatctctcagcgaccaggtgctgctgctggaggagaggctakgtgcctgtgagtcctcacactcctcccgccttgacttctattccccaactttccccaagacccctctccattcaggcattccctctttcctccaagcccctctccaacattcactatcctcatgcctctccactttaccatcgttctcttctgaaatcctgtccccagcccaacagtttcacttattgtttggtgagagtggcagtgtagtccactccaggctgaccacagccactgtgtctgccatgtcattaaccaggctcctgtgaggacaacagcctgggcctcggcgtcaatcatcgataagaagcctctacagcacccctgccccctaatttatacagaaaccggacccactaatcctctgggattggccgactgtgagctgcagataaggctatcagccaccaaagagcaatgaacaatggaaacttcagagagctgaagaaasggggaggcctgtgttcttggcctgcccctgagtcttctggctgggggcaggttgcctgggcaagaactgcttcttcaattccttaacaaatgcaaccaccaacacccagatctctctctctctttattttcagtttttttgctgttatccrrataattaataaaaaccaaccacgcaaaactgggtcccaccctctccttttgctcccagcctacctccccagttgkgggaacaggtctggagtgagaggcagggagtggctaatgccaccaggaaraaatgaaaactggctcagagagggggaagcctcaacagaaaaagaaataaattaaaagccctcctatcccctccagccagggttcgttcctttccccaactccccagggggcaraagtgagtgcagcacctgatgtctgcttcttccccttgtgtctggtgagatggtgcagcagggctgcagggggctgggtggggtcatgtccactgaagaactgtactatggggacagaaaaccagaaatgtggagactgaactggtatcccagagagtgcacgaccctgggcatctgggcaagggcaggcatgagacctctgaattagaagggtccagcccccactgacaggaggctacactgggagggaaggtgaaggtgctgaggaaagctcccakgatgagcctgggagtgcttcaggtatcagcttccagccagagggcgagaagtcctcctcacaaatggatgagtccattgaatccatggactttggagtgggggggatttgttccaaagaatggatgagtccactggccaatgtggggtagaggggtagagaagaccacataggaagagactccactggggatggaatgttcccctcccttgtgtaggctgagtcactggagatgagggggaggcaactgtcccacagacaagacagtaggaggtgggggtcaagagtggaractgcaccgaggcaagagtccatggatggggccaagagggggcaggagtggcgctgtatccacattcacttcagaagttgaagattccaaakaggagaataagtggggagaggggagacaaggaagagggtttggccctgcttcagggcccactgggtgggtaggtgtggggaggaagatggggacagatgggaggagagctcagagccagggttcacccaccgcccccaggcttcttcagatagtcaccaccaccccggccatcagtggagatttcccggaaaacagtgagcatggagtgccggactctgtcagccagagctgggacgtcatctggtgtcagcccttccgtgggcactgggggcagcacccgcacctgacattgtcctggggcaaggggagcaccatcatggcctgtccacccaggtctttgcccacaggtggggcccagcttccgagtgatactcttcctcaacctttcagttctcttcccccaaccctggacaaccatccctgggcttgccagctgccacttctgaggcccttctcctatacaaagccttctccaatccccagttcagacatctcctcagcacccctccagcccccctcctctgggtttggcatttactgctgaatgagtgttattcattacagctttgtgcacacaggccttatctttcctgttaagattagtaacagcctctcttggtgggaccaagtgctacccatctggcagggtatggtgggtgcttagtaaagacttattggctgatgtggggttagactagatgactgtgtagacatctcatggctctgacactgaatgatccccctgcctcacagggatgtcctcccagcctctccggacacaccctaccccagaactgctcaaagccctcacccgaggtgaagcgacgctccttcttgcagtagaagtcttggtaggaggacatgactatggggacaatgggaacctggggaagggttaaagcaggtcagtccacagctctcttcagagactcctacaataagcccctgcccagagatgagggaatggtgggggttggcagctgagtagcagaacgaagagcagtagtcacctgggcctgcactgcaagatggaaggcgccacgtttgaagggcagcatggagccattgtggtttctcgttccctcaggaaacacccagaccctcacctgggggagaaagagggtcaaagaagacaaatacatatggaggagtcagaataggtgtgatgttataatgggacctttgaggcccactggccctgcatatcagtttatttacaactgttctactctgtatccctccaatcccccatttccccaggatgactcacgtcctgggtgagcagggtctgggcgacctcagacatgacactgatggcatcccccgtgcgcttccggtcgatgaagatgactcctgccagccagcaggccagcccggcagagccagcccacagtagctcgcgcttggcaatgggcacacagcggcctggcagtacctccatcatcccttgggcagggtgggagtgggtgaggatcggggtggaggcagagtgtcacagaaggcaacccacctcacccagctcatcaccctctggtagggactggaggtgaaggaggagactaggcagggaggggggccccaagtgaaggaaagggtgaccaaaagtatatgtaccctgcttatgagggcagttctacccagggaatgaaggcctgagtgggaggcaagggggcaatgtcccagaggaaggggaattgaggatctctaggagaagatattctagggaaggtttcaggaggggaggcatggctgggggaggtgtgccctgtggtggggtctcaccaagcagatcgagagagctctggtggttggagacaacaacatagggctgcgagggagggaagtggtgagcccctcgcacctccactcggatcccgtacaggtatttgatgtggagcagcattagacgcaagatcctgtggggtcatggcaaggggtcccagtgggatccattgatgtccatctgcatgcctcagctccccccaccttactgtctttctgaccacctttgcagtcctctccccattccctgtctctggtctctctcagtcttttctacacacaccatgcccccttcccccaatccactactcactttgtacccttaggttccctcattgcccaagaccccttgcccctcacttcatgttctcgacgttgcgtcctcgcacggcacacacagggatggcgagcacagccaggaagaggatccagccattgtagaaggccatcttgaagaagtacttggcactggggctgcagaaccacagggtgggcagcaggaagagcagcagcaggaagagcagcagcagcagcatccatgcccctggccacaaatccattctggccacctgcaggggatggggcaagggacaatcagcctggtttctggaggagagtggggtaggcaaggcacagaaggcagggctgggggctggtgctatgaggacaagggcctgagacacaaactggggcaggggtctcattgaaaccttcccaggaaggctctctaggatgagggtggtggagaaagagctcaggactgctctcccaccactcttcccaaaggctccggatatattcagacaagagacacaagacacagacatctacaattcacagatacctgataataaatgacaacaagaataatagctaacacttgtagctggtaagggtcttataatggtctatacttgtgctgtccgagaaagtagccaccacctacatgtggctacttgaaatgcagctagtctgaactgagatgtgctggaaatgtaaaatacacatcagatttcaaagactgaataaaaaacaaaatgtgagatatccattactaatcttttatgctgactacattttgaaattataatcttgggccgggcgcagtggctcacgcctgtaatcccagcactttgggaagccgaggtgggcagatcacgaggtcaggagttcaggaccagcctgaccaacatggtgaaaccccgtctctactaaaaatacaaaaattagccgggcctgttggcgcatgcctttaatcccagctactcgggaggctgaggcaggagaatcgcttgaatccgggaggcggaggttgcagtgagccaagatcacgccactgcactctagcctgggcaatggagtgagactccatttccaaaaaaaaaaaaagaaattataatcttttggatgttatcagattcaagaaaatatattactaaaattaatttcactctttttgccttgtaaaaatgtggctaccataaaaaaattacattgtggcttgcattatatttctgtagaacagtactggtctatacattaagttaaactcttaaaatgatgcatatgatagtctagaaagtactattactatttacattttataggaaataggcccagggaggctaaataacttacctgaggtcatacagctcctaaacagcagtttctaggttaaatctaagccgcctgtgttcctaaccactccattacgctgacactggtatgtattgcatatatatatacgaacacagcacacagcatatatggtgattgtgacagaacactcacagccatatacccaagggccaaatggcaagattaaaagttcgtgtcactaatgccaacagacacacagtcatacaaagactaacatgttcacacatagacacaaatttataattacacccagtgacagataaaagaatgtaaatgcataactagaaaaatccctctccacccaggcagctcccctattcctaggtaaacttatggacatacctggaatagctacaaagaccaatcctacctccagacaggcaaacgaatcctactaccctttcccttccttctagtgacactttgcgtgggcaggtacagtgtgtgaggcctcaccaagtgaaaaaaggagggaatggagtaaaggtgacctaacagcacttgccctgggagaggaaagggctcaagaggaagagaggcaggaacacagaacctgtgttctaggttcttcctccttcctccactctgccccagtgttgggggcagggtaacaattcacaaaaagggtgttcaggcaaatacctgtcattcctactgaggccacaggcactgtcttcccatgatgggaagggctatgctcaaaggtaagcctattgccaagcgagaaggtaacaggcaatagaggaaacaggagaccctgccagttggaataccgtaggctttctgagctgctccatcccactgcccctacaagttcagaacagcatcatttctcccctgaactatgtggagtaggctcccaactccctccaatccatcttccacgtagcaaccacagagatttttctgttagcacagatttttctgaaacacagagcatttccctgtcttgcctaaaggctcttcttgataagttgacttctgcttacatcttcgaccacatcctcacaaaactctttgttccagtcaaactgattcacttcagttcctcagacaccatgatctttcatgcttccccaccttgaacatgctgttccctttggctggaatgcctgtctcttctcctgcctcacacagctcagtgtcaccttttggagggctgcctgaacccctccaggcctgtgctttccttacacttttatcttgatcagcgggtctcgaagtatagaaatgcaaattattagacttcaccccagatctactgaatcagaaattctgggcattaggtccagcaatctgtttttctttttctcactctgtcactcaggctggttttgaactcctggactcacgcgatcctcctgcctcagccttccaaactgttgggattacaggtgtgagccatcgtggctggctagcaatctgtatttcaacaagccctctggtgagtctgatgtgcgcctgaatttaagaaccactgatcttgacaacacactatgtgttgactggcatttttgtttccctccttaggctgtaagcagcttaaggacagggactctgtcttatctccagtgccaggacaataggagatggagtaggtgctcaataaacacttgctgaacagattctaaggctgtatacccacccatagagccacagttaatgacagagatggcggttctgatcacaaattagatagttatcctcttgagtagaagtgactactaaaagaagtcactgagaaagtaacgaacacaccaagcctaatggtaaccgactctgaatagatacatgcaatacatagccataatgaaggcagagtaacaataatcaggaagaggtcatctcacaagagaaatgtaccgaatgggatcaagatgccacagggaaagatgctgctctcatcaaatgtgtgccaacagtgcaaagaatggaggataatgtccataaataaataccaacaatggggttcacagcaggattgaccctgtgacatgcattgagctcatggacacagactgtacacagccactggaaagataatgtttgtgtagagaggtatgggccagggaggtcaccaaggtaaggcatgcagggatggttctttgcagacctggagacccagttaccttcttctcttaacacttgatattaagtgaccctctttggagaacaaaagtccaaggatttagaaatgcaatggagggccaaatttaatgagcatacggctcacaaaatatactgatgacaaatttataacacacattctatggtcctgttacatcagtgtatcatgcaaaggcgcatacacatgtgttctgtgaactgtgactgggaaaacacagcaaacaggccaattcagtcagacatcagagtgtggggtattcagccaagccatgggatcccacacatgaagactactgcaaatggtaggaccatggacatgtcagccaaagcaaaataaggtatataaccttcacatgctgaaataaacatgccaaaacataaaatgtgcaagtaacatgaaattatagaacaggtgcaatatatgaaaactcacacacatgcggtacttaaaacatgtcaaaactggatgtgagacatggacacaagaatgaagaatgggcaattctgatagaaaataacacaccatttctacacagcctatggatagcattgggacaacctagttgcacacaagccattaaacatgtcaaaggcacacagactcaatgtagaaaacatggctcccataaggcatttgtgtgtcagtaagggtctagcagtgtggaaggccactgagaaacaagaggtcctgtgc

SEQ ID NO: 94472 - DNA, 14788 bp, Homo sapiens
cattttgaaattataatcttgggccgggcgcagtggctcacgcctgtaatcccagcactttgggaagccgaggtgggcagatcacgaggtcaggagttcaggaccagcctgaccaacatggtgaaaccccgtctctactaaaaatacaaaaattagccgggcctgttggcgcatgcctttaatcccagctactcgggaggctgaggcaggagaatcgcttgaatccgggaggcggaggttgcagtgagccaagatcacgccactgcactctagcctgggcaatggagtgagactccatttccaaaaaaaaaaaaagaaattataatcttttggatgttatcagattcaagaaaatatattactaaaattaatttcactctttttgccttgtaaaaatgtggctaccataaaaaaattacattgtggcttgcattatatttctgtagaacagtactggtctatacattaagttaaactcttaaaatgatgcatatgatagtctagaaagtactattactatttacattttataggaaataggcccagggaggctaaataacttacctgaggtcatacagctcctaaacagcagtttctaggttaaatctaagccgcctgtgttcctaaccactccattacgctgacactggtatgtattgcatatatatatacgaacacagcacacagcatatatggtgattgtgacagaacactcacagccatatacccaagggccaaatggcaagattaaaagttcgtgtcactaatgccaacagacacacagtcatacaaagactaacatgttcacacatagacacaaatttataattacacccagtgacagataaaagaatgtaaatgcataactagaaaaatccctctccacccaggcagctcccctattcctaggtaaacttatggacatacctggaatagctacaaagaccaatcctacctccagacaggcaaacgaatcctactaccctttcccttccttctagtgacactttgcgtgggcaggtacagtgtgtgaggcctcaccaagtgaaaaaaggagggaatggagtaaaggtgacctaacagcacttgccctgggagaggaaagggctcaagaggaagagaggcaggaacacagaacctgtgttctaggttcttcctccttcctccactctgccccagtgttgggggcagggtaacaattcacaaaaagggtgttcaggcaaatacctgtcattcctactgaggccacaggcactgtcttcccatgatgggaagggctatgctcaaaggtaagcctattgccaagcgagaaggtaacaggcaatagaggaaacaggagaccctgccagttggaataccgtaggctttctgagctgctccatcccactgcccctacaagttcagaacagcatcatttctcccctgaactatgtggagtaggctcccaactccctccaatccatcttccacgtagcaaccacagagatttttctgttagcacagatttttctgaaacacagagcatttccctgtcttgcctaaaggctcttcttgataagttgacttctgcttacatcttcgaccacatcctcacaaaactctttgttccagtcaaactgattcacttcagttcctcagacaccatgatctttcatgcttccccaccttgaacatgctgttccctttggctggaatgcctgtctcttctcctgcctcacacagctcagtgtcaccttttggagggctgcctgaacccctccaggcctgtgctttccttacacttttatcttgatcagcgggtctcgaagtatagaaatgcaaattattagacttcaccccagatctactgaatcagaaattctgggcattaggtccagcaatctgtttttctttttctcactctgtcactcaggctggttttgaactcctggactcacgcgatcctcctgcctcagccttccaaactgttgggattacaggtgtgagccatcgtggctggctagcaatctgtatttcaacaagccctctggtgagtctgatgtgcgcctgaatttaagaaccactgatcttgacaacacactatgtgttgactggcatttttgtttccctccttaggctgtaagcagcttaaggacagggactctgtcttatctccagtgccaggacaataggagatggagtaggtgctcaataaacacttgctgaacagattctaaggctgtatacccacccatagagccacagttaatgacagagatggcggttctgatcacaaattagatagttatcctcttgagtagaagtgactactaaaagaagtcactgagaaagtaacgaacacaccaagcctaatggtaaccgactctgaatagatacatgcaatacatagccataatgaaggcagagtaacaataatcaggaagaggtcatctcacaagagaaatgtaccgaatgggatcaagatgccacagggaaagatgctgctctcatcaaatgtgtgccaacagtgcaaagaatggaggataatgtccataaataaataccaacaatggggttcacagcaggattgaccctgtgacatgcattgagctcatggacacagactgtacacagccactggaaagataatgtttgtgtagagaggtatgggccagggaggtcaccaaggtaaggcatgcagggatggttctttgcagacctggagacccagttaccttcttctcttaacacttgatattaagtgaccctctttggagaacaaaagtccaaggatttagaaatgcaatggagggccaaatttaatgagcatacggctcacaaaatatactgatgacaaatttataacacacattctatggtcctgttacatcagtgtatcatgcaaaggcgcatacacatgtgttctgtgaactgtgactgggaaaacacagcaaacaggccaattcagtcagacatcagagtgtggggtattcagccaagccatgggatcccacacatgaagactactgcaaatggtaggaccatggacatgtcagccaaagcaaaataaggtatataaccttcacatgctgaaataaacatgccaaaacataaaatgtgcaagtaacatgaaattatagaacaggtgcaatatatgaaaactcacacacatgcggtacttaaaacatgtcaaaactggatgtgagacatggacacaagaatgaagaatgggcaattctgatagaaaataacacaccatttctacacagcctatggatagcattgggacaacctagttgcacacaagccattaaacatgtcaaaggcacacagactcaatgtagaaaacatggctcccataaggcatttgtgtgtcagtaagggtctagcagtgtggaaggccactgagaaacaagaggtcctgtgcctagatggaaacagaggcacctaagggtattcctaagaggcaaattctgctggccttctcccctcatgacccttcaagagtcatgtggggtcaaagggcaagaaaaggaattggggaaggtgtagggaattccctctccaggattccctgtgcacgctcccagtcccaaattcacaagggtttccatttctcctccctcccaggtctcttccatccttcctccctctcaggtcccctctcctatccccagcaaccctcttcccagtcggcccctctcctttccccagcaaccctctcccccagtcggccctcccagacccaatctctccccttcccctcatcctagtcgctttcagcaccctcttccctcctcctcccatccctttcccgcccacacctcagaggggtagggggcctggggggctggccccctccccagccaggctgcggcagcggtggtggcggatggctgtgtctctgtctctgtcggggtgtcggtgccaagggggcgacgggatttgggggtgtcctagccccggccgatggaggggaggtgggagtgggaggttgggcccatagcggtaggaatggtggggggctgtccccccagcaccctccctccctccctttctgctgtctctctgagggctggggctgctgccgccgctattcccccgccacccctccccaacgcctgctggtttccggggccggccaggaagtggagggcggtgatgggcagcctgttttgccaatcgtctcccagaaactctggcatctcctccccacatctaccagtgtcctcttgcgagccccgccccagggctctccctcggtctttgcccccatctctggctccagctgcatcttttttttctctaactccctttcagctctggatcccctggtgctgtattcctccttccgcacattccttcctttattctccatcagctctcttttaactgccacttttacttggtctctttttttctcaactccggttatctgctgcttattccccccaactattcttaaggaccccttttcccgtacccattcaattctaaacatttatcaagcatctacctaccatatgacaagcattaagttcacctctcttctttttctctccaggactccatctcactccatctcactctccagtcctctggtctggtttcctttgccctttgtccctcactatctcccagcagtccagctcccccctccacctgccttctctggcctttaaagagaagagatctctttggccttatccctgaccctttccttttccatgctcttttacctctgtaccttttctttcctacttccttcgtatcagtctccttacttgcccaagctgagacaaccccttctcacaacatacaatatgggtacatcttttcttccaatggaaatttggcttcaggggtgctttctagaaaaataaaaagtgaggaagaatgccgattcctctggaatgcgcgtgcctccttaatttggtagccatgtatctagttttccaccccctcttctcttcctccactcccattatccctttactaggatcattccatcacttcactctccttcatttccacctttccctctcaatatcttccttcctaaacctcaagcttcctgaatcctcatctgccccagtccttctttacgcaactgctaacttctcatctttccttactcttgagtcacatgggatcttttatcaaggtcccccctctagccacacctttaccctgcattagtttacatgccctcgggaagaggattggtagtgggaggactgttacctaattctgctcctttagtcacagtgagggtcagtgattgtaggaaaagcccaaactccccggggtccaacctgggaagaagaccctatttctgatgggcaaattataaagaggaaagggcgggtctagcctccgcgggtctccttaaaaggggcgggctttgtcccttttgcaccactcacaaaggggttgagcccagagctttcctgctctgaaggtttaaaacggagttgaagtcaatcctgttctactctgtgtacaacattaagaaaggggtgggcctttagttcagttttgctctgtaaatcacctaatatggggagggctgagtcgtccagccgaatgagttgggttaacaccagcgccgcagatcgatgttcccactatccaaacgtcgggctaatcccagttctgctcccttaactaaaagggaggggcagacccaagttctgctctctacgtcaccaaaggaggttggagccattttgaaccctgcgaccctagtgttttccctcttttcctagctcttcgccgtctttcccgatgtcggccaatcaggggaaaaggaaaaggcccaatcagcagaaagtccacagctgaaggacccggatgaagcgagcctaggactttgaagtgcaagcctcgccaattgtagagcagtcaccatggcgacaagataggggtgaagaggtggaacaagagaaggttaaaccctcacaggattggcccacccccgtcccgccgcgtgctgcgcaggcgcgttttacctaaccaccattttccgkcaagttttagccaatgagttgatttggagccatacgctccaaagtccaatagcaatccggacattctctaraagaggaagcgaaggaaagaaaggggcttatagtgggcgaggtctataggtagtcccgagcaaattgcttatggctttggttatgactgacaactactcagacgaataaagccctccttggccaggsgacagsgtgtagcgagttattaccaatcccttggcattgcacattgacttagaccgtatcagccaatagccattgtgcgaaggcaggactgcactaaccttttcccgcccctaccctttgggccaatcctttcttttgaattctttgtgactggcaggcattcagaccaatagtgattaggaaaccttgaagcctgcccaacgatcgtgggcaggaggtggtttctggtttgttggggcgtgtgtatgtgtatttggggggactgaagggtacgtggggcgaaacaaaaccggccatggcagcagcggaggaggaggacgggggccccgaagggccaaatcgcgagcggggcggggcgggcgcgaccttcgaatgtaatatatgtttggagactgctcgggaagctgtggtcagtgtgtgtggccacctgtactggtgagaatcgaggaggggggcgggaggtggtgggtctcgcttatatactggagaggctaggagmgaataatcatacagtcatacagataatcggagggcacgttcccataggtgaagcccgacaggagacataagactttgctggtatgtgtgggtgggagtataacggtcgagatctgtggaaagaaaggtcttaggaaccaggagctgaggcaygtgatgtgctgagaagagaaggtggggcggggartggcaggacaatgtgagacccgagccaccttaccccagagaagtgaggggtcttagctgtgcaggtggaaacaagtgagacacaaaggttaagggaggcacgcatcagttgagtcggggagaaccaggaaatatggatcacattcagatgagatctgggagggggctggtataagggcactgtggagaggcagacttgaaaggttaaagggtcataaagatagggacattattgagcttgaaagtgagtaatgggggaatgtgctagtaaaggggtttggtttggagtgatggggttggggttgaaaagaggagacccrgaaagaggtggctgaaggaaattagaaattaacttgaaaggcagaaaagagagggcacgaaaatttgtaygtgtttgttggggagaggagaaaggagagggttgagtgtgttgaggatggacagagctttaggtgttggaagatcagacaagcaggaaggctaactaagttggctggcatggtagaggttgcagaaaatctgaaaagcaacagcaggttgcttgggaagaggggttagatgggattctgcgaagtctagggtctgtgtctctcttttctgtagctagtttgacctttttttttttttctcccccatccagttggccatgtcttcatcaggtgcgtactcaggagatgaagagggaaatggggaggtctgaggagctgtaagaccctcttgtatactggaaaccaccttttttctccccagtggctggagacacggccagaacggcaagagtgtccagtatgtaaagctggkatcagcagagagaaggttgtcccgctttatgggcgagggagccagaagccccaggatcccaggtgagagactggaggtgttgcttagggaagattgaaggcttctgcccttggaaaacggtgtggaagatgggaggagaaaaatccctgttaactttctctctccacttcctcagattraaaactccaccccgcccccagggccagagaccagctccrgagagcagaggggtgagtcttcttgtccagttgtgtcccttccttgacagatttgccggcttccygtctgactttttctgcctccctagggattccagccatttggtgataccgggggcttccacttctcatttggtgttggtgcttttccctttggctttttcaccaccgtcttcaatgcccatgagcctttccgccggggtacaggtaagagtcacactcagctcccatsagggagccctgtgaatcccctcaggccccctcccagcctaggagcatatgcttccacagctttcctctctcccacaggtgtggatctgggacagggtcacccrgcctccagctggcaggattccctcttcctgtttctcgccatcttcttctttttttggctgctcagtatttgagctatgtctgcttcctgcccacctccagccagagaagaatcagtattgagggtccctgctgacccttccktactcctggacccccttgacccctctatttctgttggctaaggccagccytggacattgtccaggaaggcctggggaggaggagtgaagtctgtgcatagatgggagagccttctgctcagaggctcactcagtaacgttgtttaattctctgccctggggaaggaggatggattgagagaatgtctttctcctctcctaagtctttgctttccctgatttcttgatttsatcttcaaaggtgggcaaagttccctytgactcttcccccactccccatcttactgatttaatttaatttttcactccccagagtctaatatggattytgactyttaagtgcttccgccccctcactacctcctttaatacaaattcaataaaaaaggtgaaatatattgatgggatctcttcccaagttcgcccccacccccgacagaagcatcttctccccaacttgagtagatgtttggtatagtatggtgaagtatgggggtgagtccctttccttcagggccctcaagggtataggggtgaggttgtgtctcatacacacacacagacacacaagagcaagatgtgtcaggtgtttaatcatcattgtggggggctctggttgtagaagaaagcttggcaaggtggggttatacaggagagagattatacaggagagagttggtctgaggccagaacagttcaagggaaaaagaaaagggagctgatggatgggatctgtctgtgggcccctcaaggccctccagtactactctcgcctgcctcaggttcctccgactgattcagttctgcacgctcctcctcttcctcctggttttctggggccttcctgaggagaaagattggggggaatgcggcacgttgtcgttccaccccccgacccctcttcgcttgctgcctggaagccctaggtctgaggggtctggctttctccactcacctctcctctcctcggcgttgccgcctttgccacaagatgaccccaatgagcagggcggctgtccccaggcctcccaggatccccagggccagggctagagttcccagccctgatcctcccacagagcctgtacggagacagggaaaattgagagcacagccaccaccactcaccattcctttcttgttgaccatccccccagtcacatgtgttgggggctatcttctgcttccctgactttatcaaacccctcacctgcagttggcccctcctcgcctggttctggaagacaaagttggatccagtcagaaaggaagacttcgggttgagagagggttatttagtgggagccccagtggagtctttccctttctttttttttttgagatggagtttcacttttgttgcccaggctggcatgcaatggtgcgatcttggctcatcgcaatctatgcctcctgggttcaagcaattctcctgcctcagcctctcaagtagctggcctcccaggtagctgggattacaggcatgtgccaccatgcctggctaattttgtatttttagtagaaatggggtttctccatgttggtcaggctggtctcgaactccctacctcaggtgatctgcccgcctcagcctcccaaagtgttgggattacaggcgtgagccaccgcgcccagccgtctgttcctttttttagctcagagggaagaagggagaggcttggctgctctcttggcagaatttgggtggggcaggggaggcttgggtgtgggtgcatggagggagaggtggggtggctgttagggataaggccagaatggggcaggaaattagagcctgtgctgtcctgcaccctagtcccagggtctgtagggcttggggagaggtctcaccgatgatgctgatgctgacagcacggctttcctggggcccgtggctggaatgggtggccacacagctgtaggttccctggtcctgaggccctatctcagggaggatcagcacagggctggggggaaggggcaagggcacaccctggtgggggaaggggagaggagactatttcaaaacccttgtctttttgtctccatatcttcagataccctctcttcctcctcagctcctagcctgcctttccctcgttagccctctgccctccctgttgctagttatggttcaccctacctcccagcccctctctccaggtcactcacatccttcatccagtggatttgaggagagggctgggcagggacttcacaggtcagggttacggttccaccaggagctactgctccaccttctggctccaccaccaattggacctcctccagaggcacaggctctgggagttggaagggttttgaggtggagagttacacttgtgagtgatcccagtggccatgggcttgactccctctttccctaagggtcagacttccagaacgtgctcacgtgagcttggggccctccccacctatgctcaccccagacacggggctggatgggggctgtgcgcaaggcccggtgtcggggaaggcctgggctgaagctacaggagaaggtgggacggggatctcctccccgggctggggtcaccattagctccgactgcagtgtgaagagccctgtctcagggtgtctcctggtctgttccttcacagatactcctatgatgggaggataagacaaattatcccagggtgggtgtgggagtgagatcagggagaaggcagcttggggggcaccttaggactcacccttctcattaggcaccaggggcttcccatccaagtgccagctaagagtccctgcagggtagcttccctctgacacacatgtccccacctggggaaagagtggtgacctcagaatcctttgaaaatgagagatgccacacacccacacccacacacactcgcctcctgttcacagggccgttttctacttctcctgctttcttccactaccttattgggaacaccagccgtgagttcagaggcagaatctacaatttctggcttcccaggaatctctgaaggaggaaaaatccagtcagaggctgtaattgtgaaggttctcaaactctgtgtgtggaaatgaggccagtggaagtcagaggccctcatgggccaaggctggggttgaaggctttttcttaggtaagagggaggccttggagaagaccctggaattcttacggtagacacggactcggtagttggacttggtctcctttccattcctgttcattgcctggcaccggaaaatcccctcatcctggatcccgacagccggaaggaagagggagccgttgggaaggacacgagccacactgtcccaggggcctcctccctggggagacaggaccttccaagcttctgtccggcctgtgttctagaagcagagaagcagggcctaaacagtgcaaggcctttgggaaaggactgtgaggcagagtgacggggatccaaatcattgctggtctccctggaagttgggaggctgcaacaggagccccgcttaccagtttccattccagccgctggggtggtttcttgggggcccccttacacttcagcaccagtggctcgccaatccgggctgtgatgttttgagcacctactactgcccctgggagatagcaccatggtagaggggtaggaagggaatgagggctaacaaaatttggacagggtgggtgagggaccttgaaaggcacttcctcgggttctgggaaaagttctaggacgactggggtgtggggttaaagtgctttctgcagggagggtcagtggggttgagggagtggctcaccccacagactgaggaccagcacccaggctccaactgctgttccggctgccatcctgcttccttccagggtcctggctctgtctgcccctctccctgctgtggcctccgccctaggtggggcctgcaccctctctccagcccccatctttcagtcgtcttgtcacagggaatgctaggaattcatgcctttgggacaagagtccttcaggtactagagaaataattatcaccccacccctgggtactaccagcctctgggtacagtcacttccctgggggatggggagtgtaccctctagggtctcattccctcagagcccccgatcctatttattccatcagtccatcagggctgcctggtgacccactggagccccatcttgattgcgcaaagttgcatcaatagggttcaggccagactgttgtctgcaagggtgcaattgggcctgcatcatgaaggcaaggctggggaacaggagagaaacctgtttggaacttcgtgaaagaaaatcattttttttctggggtttctcatgttttttgaaaaaaattctcaactaaacccagggaaaaaagaaatttctttatttaaaactgcattttgttttttttctgtgaaactacacaagtttacaagtgaggagagaactgcccccggcccatgcctcccacccccccacccatcacacttccaacctgtccccagtcctgcccggatctttaatgggaggggttccccactctgacagtcttgtaaaatcctgagaatgtctgaggggatcagatggtagctagttcagggctgaggatgggacagtgttgatgttacttttcccccacatctggctttttgcaacctcctccctctccctaccccttgattttggtgtgacaaaaagatacctcatttatggggaaattgaggaagatacatatacaagcaccccaacccatatttaacatatttggcaataactcccttcccattcttccccctccaattttcaaatagtagttttttaaaaaattaaagacatgtcactcacaggggaagatggcatcttcaatttcctcaaaattactgagtccagccctgcccaagggttgtgggaagaagggggatgagaggccagcagggcaagcccttcactgcctccacatcaaatgcggcagaaacctgcctgcatgaacaaagaacacctaagggattttagggggcaaagcttggtgccctgtaaaatttacttcctgatggacaggcctggagccaggggggcctctttaccagttctgtttgtccccctttctcttaccagaacccctttggctatcacccctaatatgggaaagtaagaaataaaaaaaaaagacaagaaatcaacatatttataaaaaaaaaaacaagctacttccccaaactaaattaaaaattaagaaccaccaccaccaccaccaccaacaacaacaaaaacaacaacaacaacaaaaaaaacagatggatcccagggtttctttttctttctttaaaaaaaaaaaagttcaaccccaaagcccagtcaataattccctaaagtagcagaaactccctccgaggtagatatctgagtcagacactctcgtccaccgagcgattctattggtttaagatgagctgcgtatgaggtaagtaagccgtccggaggggcgggggtggggatgcatgggggcgtggcccatgtcctctgtccagaagtcatgtccccatttttggcatctctgattgggcagggctggcgtctccacagattccagagcatacaagtggggtggggaagggaaagtgggggagcccaggagagaaacagaatagttgcaagtgggagtatgtgtgtgtgaggtgtgggagagggagagagaaagacagaggagaaaaaggggtctgagaaataggtttctcggtatgtgtatgtttctgtgtaagaaagaaagcgagagaggaaaaagatggaaaaaagggagagacagaccccacactccccttagaggccccattcttcctgccatgtaattagcacccccagcacagagagtctcgttagggaggggatgaccccattggcccttctctgtcttgtgcttctcctgtattggggtttgtcctctggaagcctgcgtcctcttcaagtcgccttgtgagagcccccacccctgtgaccctgaggggcaagatcagttggaggtatcagagtgaacactccctggtccctccgttggggatgtcactgaagagggggtcacagcctcttgccagctgccatttgcctgaaaggagagacagagtacagaaaacagagaaagccctgggaaccctgtgtgggcacaacattactagggaaaatgcccctctgtcctgtgagaactggacagagaggagcttcaggatccactcaccctcatttcccgtgggctgtacatctggcctcccccgaggttatccccatagccccctggccccatcgagtgtcggagtgattccacctgcaggcagcagaggaaggtatgacagtgaagagaagcctcagaggaaagaggtcttgtatcctaaagtagaggaaatggagttggggaaagccctattcgagaggagat

SEQ ID NO: 94473 - DNA, 14099 bp, Homo sapiens
  misc_feature (1)...(14099): n = A,T,C or G
gcacaaaggcccggctccctagcaaggccaccaggccctgtatgactgcaaccccattgttctctcctgcattgccttctgatttacaatatttgctgcccttgatccaggaaaccttgcagggccccacaacagaggcatgggttctcctgcaggaggccgcactggtgcaggaggcagcactggtgcagcaggtaggctgtgtagctgagggagccactgacctcactgctttctcaagagagcaaggagagttccccaactggctggctgtgctggcagcaaggtttccagggttgaggtgggtggggagattcgtattatgctaattagatctggctccttaggactgtccctcaggcactgatttctggaaagggctcattgagcttgactttgacagatggcctctgggatgaatgagtgtgagtgtgtacatgtccatgagtgtacataggtgtccagtatgcatgtgcgtctgggtgtgtaggtgtgactatgtgtatataacattgggatatgtacacatacactcctacatgccatgtatttgtgtgtatgtatatgtgtatgttgcatgtacacatgtgtatgtatgtatatgtgtatctgtgagtgtatccacatgtacgtgtgcatatattatgtgtgcatgtatattcgtgtgggtgtgtatatttatgtgcatgttggtgtgtttatgtgtgtgttcatgtgtgaatatggatgtatgtgtatacatgggtatacgtgcctgggggtgtgtttgtgtgtataaaatatatgtgcatgttcatgtgtgtgtaggtacatacatagctctgtatatagatatatgtgtatttgtatgcagaaagtgtggacatcaacggatgtgtgaatttgtatctataactaggttcatctgcaaaggtgcatatatgtttaggtgtatgtatgtatatgtatatgagagtgtgtgtgtgtttgggggatgcaggtatacatggttgtgtggatttgtgtctgtgtctgggtgttgtctgcatagatgtgaatgtatgtgtatgtgtgtgtaggtatatgtatatgtgcatggatgtgcagatgtgtgtttacatctggatgtatctgcgtggatgtagatgtgcagatgacatacatctatgtgtctgnnnnnnnnnnnnnnnnnnnnnnnnnnnnnnnnnnnnnnnnnnnnnnnnnnnnnnnnnnnnnnnnnnnnnnnnnnnnnnnnnnnnnnnnnnnnnnnnnnnnnnnnnnnnnnnnnnnnnnnnnnnnnnnnnnnnnnnnnnnnnnnnnnnnnnnnnnnnnnnnnnnnnnnnnnnnnnnnnnnnnnnnnnnnnnnnnnnnnnnnnnnnnnnnnnnnnnnnnnnnnnnnnnnnnnnnnnnnnnnnnnnnnnnnnnnnnnnnnnnnnnnnnnnnnnnnnnnnnnnnnnnnnnnnnnnnnnnnnnnnnnnnnnnnnnnnnnnnnnnnnnnnnnnnnnnnnnnnnnnnnnnnnnnnnnnnnnnnnnnnnnnnnnnnnnnnnnnnnnnnnnnnnnnnnnnnnnnnnnnnnnnnnnnnnnnnnnnnnnnnnnnnnnnnnnnnnnnnnnnnnnnnnnnnnnnnnnnnnnnnnnnnnnnnnnnnnnnnnnnnnnnnnnnnnnnnnnnnnnnnnnnnnnnnnnnnnnnnnnnnnnnnnnnnnnnnnnnnnnnnnnnnnnnnnnnnnnnnnnnnnnnnnnnnnnnnnnnnnnnnnnnnnnnnnnnnnnnnnnnnnnnnnnnnnnnnnnnnnnnnnnnnnnnnnnnnnnnnnnnnnnnnnnnnnnnnnnnnnnnnnnnnnnnnnnnnnnnnnnnnnnnnnnnnnnnnnnnnnnnnnnnnnnnnnnnnnnnnnnnnnnnnnnnnnnnnnnnnnnnnacctgagtcagttggctcaaggagagccccaacttgaactcagaacagtgaggactccttatagtcagcctggtgatgctgcaggcaaaagcacagaagggctgcaggtctgggccccctttttgggtacgctggcccctatctcccttcaacctggtctgctcagggccccaaagctaggttcatccctttaggacagtgacagctcctcagccatcgacttctgtatataagcatgtcagatgaggccgagcaaagaaacactgaatttaataaagccaaggaaccaggagaactctccaacccaaatcaatcctcgatgtgtttttaattaagttatagcccttgtgattaaagagtgtgaatttcattactgtgaccatttatcaaggagcatacccgctgaacctttgtaacaggcagggaagaaggctttttattttcatcaacaccaagtgccctgtttgtatctcaactgactcatcaaggaaaactgtctcccctcccaagctgccacccactcagtaatgacaaagccatgcctgcccccacactgcccatcaataggccaaggcagatgagtatgaaacttctgattttgttcaagtgtcctccacaaccctcatccagccaggctactgcactgccaaagtgcaattcgggccccaggagtcaaggtgcatagagcaaggagcctaggcattctcagatgctggagttggcttgtcctgaaaaatgatacatttaaaactttggcctaaccacaactcaactagctacataaatgaatgagggctggaggagggaaggaaggagaagagacaccatattggatgttaacaattgaaaggcaacctcagggactctgactttgctagtttctagatgtgtgtgtgtgtgtgtgtgtgtgtgtgtacatgtgttctttgcaatttgggaaattgttttattgaagtgttatatgcaaggaagtgcccagatcatgcacatacaagttgatgaattccacaatgtgagcacactgtaaccagaacccagatcaccaaacagaaaactagcactctccagaaacccccagagtgctcctcatagtcactattgccccacgatagtaaccactatcctgatttctactggttttgtttatttttatattttacgtagatggaatcagaatcagacagaattccccccccccctttgtttttttgagacggagtctcgctttgtggcccaggctggaatgcagtggagtgatctcggctcacttgcaagctctgcctctcgggttcacaccattctcctgcctcagcctcccgagtagctgggactacaggcgcccgccaccatacctggctaatttttttgtattttcagtagagacggggtttcactgtgttagccaggatggtgtcgatctcctgacctcgtgatccacccgcctcggcctcccaaagtgctgggattacaggcgtgagccaccgcacccagccagaacttccctttttatgtccagcttcttttactcaatattatgtttgtgagatttgtatgtgaatatgccacaatttatttatccattccacttttttttttttttttttagacagggtgttgctctgttacccaggttgcagtgcagtggtatgatcacggctcactgcagctgtgacttcccaggctcaagcaatcctcccatctcagcttcctgagtagctgggacatgtcaggcacatgccactatgcctggataatatttttattattatttgtagagacagggtctcgccatgttgcccagactggtctcaaactcccgggctcaagcaatcctcctgcctcggcctctcaagatgctgggattaaggtgtgaaccactgcacctggctgtgttcgaatcttgatgggcgtgtgagccactgtgcctggctccattcaaatcttgatgggcatttgagttgcttctagtttggacggcattgtatcgagcaatgctgttacaaacatttgtgtacatatctattggtgaatatatatgtctttctgtgtgttatagtgcttagtagtggaattgttcggtcatgtatgtatgttcagctatagtagatacagctatattgccacagtgatttccaaagccgttgtacaatttacccacagtacatgagcattctacttagtctacattcatatatgagcattctggttggtccacatcctcaccaacacatggtattgtctatcttttttcttttagtctttctggcggatatgtagtcaccctgggttgcgttcctaggaaagtggactataagataaatattagtgtgcagaaagtttactggggagtgctcttaggaacagtatctttgagcaagtggagaaagcaggattaggcaggcgtagaggttggaccatgatgcagtcataacaaagaccttggccagtgccatggagaactctgaagctgggatgacccttcagaattgcctcagatttgggcaggggactgagcctttatacctcatatcaaccagtcattggatgcagacctccccagcaggaggaggaactaggctgtgagctgtcagtaatcgacacttacaggagtcagcgagatgagtacttcagtcctgatttgtggaggaggaatttgggaagcacactacagaattcactacagtagtggtattgcattgtggttttaaagtgcatttctctgatgactcctgaggttaagcatcttttggccatttagataacttcttttgagaaatgttcgtttgggccctttgccaagctttctattgggatgtcagtcttttttttatttgtaggaattctttacatgtttgaatagttctttaagatatatgtctctggaggcactgccagagacatacatctcaaataactatctggaatacataatatatattgtatataaagaatttttacaaatcaatgtgaaaaagacagaaatcccaatagaaaatttggcaaggaatctgaatatatactataaatgtcttcttccccttaaggatgaccttcttccactcaatgttttttgataaataaaagttgttgattttaatgtagtctaatgcatttttaaaaatattattaatgtgtttcgcatctcatttaaggtctttgcctacttcaaggtcatgaagatattctcctatgttttctataaaatatttactttttaccttttacacatcacctagaattggtttgggtgtatgatatgaactaggagtcacgatatatttttttctatgtgatattcaattgacccacaataatttatgaaaatgtaattttttttcataaagcaagtgaccatatatatgtgggtccatttctgaactctattctgttacattttcaaattgaatgtccttgcaccaatatcatactgtcttatttattacagcattcttaatatctgttagtattaaaagtttttttaagcctgcttgaatttttattgggattgtgtcaaatctatgtattaacttggagaaaattgagatctttacagtatttagtcttccaatacatgactaatagcacatccctccttttatttagattttctttaatttctttcagtgttttcttgttttcagtgtagagatcttgcacaccttagatttatttctaggtatttggtgttttctgatgttattataaatgaaatcttttataaatttattttgtctttttgttgctaatatataaaatgcaaatgatttttaaatatgtttactttgtatcccactgccttgctaaattcacttattaattctaatagtttgtctatggattttattggatttcttatggacccaatcatgtagtttgtgaataatagatttatgtattctattctgatccttatgcttttctcccatttccttagattattgaactacattggacctctgatataacatgaaacagaagtggtaatagtaggaaacgctttctcattctcaatctatgacgaaggattttaatacttcactgttaattacgatggctgctgtagggtttttttgtgtgtgacttctccttatcagatcagaaagttcccttcttagccaaagtaagcagtagccaacttgtcagggtgggagtcatattacaaaaccgagggcagtgaagaagctgaagaagaacaagaagagaaccttgaagcaagaggagactataaatattcagaaagagatagtttgatttttttggttgatgcctccaaggctatgtttgaatctcctagtgaagatgaattgacaccttttgacatgagcatccagtgtattcaaagtgtgtacatcagtaagatcataagcagtgatcgagatctcttggctgtggtgttctacggtaccgagaaagacaaaaattcagtgaattttaaaaatatttatgtcttataggagctggataatccaggtgcaaaatgaattctagagcttgaccagtttaaggggcagcagggacaaaaacgtttccaagacctgatgggccatggatctgactactcactcagtgaagtgctgtgggtccgtgccaacctctttagtgatgtccaattcaagatgagtcatacgaagatcacgctcttcaccaatgaagacaacccccatggcaatgagagtgccaaagccagccaggccaggaccaaagccggtgatctccgagatacaggcatcttccttgacttgatgcatctgaagaaacctggaggctttgacatatccttgttctacagagatatcatcagcatagcagaggatgaggacctcagggttcactttgaggaatccagcaagctagaagacctgttgcagaaggttcacgccaaagagaccaggaagcgagcactcagcaggttaaagctgaagctcaacaaagatatagtgatctctgtgggcatttataatctggtccagaaggctctcaagcctcctccaataaagctctatagggaaataaatgaaccagtgaaaaccaagacccggacctttaatacaagtacagacgatttgcttctgcctagcgataccaagtggtctcagatctatgggagtcgtcagattatactggagaaagaggaaacagaagagctaaaacggtttgatgatccaggtttgatgctcatgggtttcaagccattggtactgctgaagaaacgccattacctgaggccctccctgtctgtgtacccagaggagtcgctggtgattgggagctcaaccctgttcagtgctctgctcatcaagtgtctggagaaggaggttgcagcattgtgcagatacacaccccgcaggaacatccccccttattttgtggctttggtgacacaggaagaagtgttggatgaccagaaaattcaggtgactcctccgggcttccagctggtctttttaccctttgctgatgataaaaggaagatgccctttactgaaaaagtcacggcaactccagagcaggtggacaagatgaaggctatcattgagaagcttcgcttcacgtacagaagtgacagctttgagaaccccgtgctgcagcagcacttcaggaacctggaggccttggccttggatttgatggagccagaacaagcagtggacctgacattgcccaaggttgaagcaataaatagaagactgggctccctggtggatgagtttaaggagcttgttcacccaccagattacaatcytgaagggaaagttaccaagagaaaacatgataatgaaggttctggaagcaaaaggcccaaggtggagtattcagaagaggagctgaagacccacattagcaagggcacgctgggcaagttcactgtgcccatgttgaaagaggcctgccgggcttacgggctgaagagtggkctgaagaagcaggagctgctggaagccctcaccaagcacttccaggattgaccagaggccatgcgtccagctgcccttccacagtgaggccaggctgcctggccttgtcctcagccagttaaaatgtgtttctcctgagctaggaagagtctacccgacataagtcgagggactttatgtttttgaggctttctgttgccatggtgatggtgtagccctcccactttgctgttccttactttactacctgaataaagagccctaagtttgtactaaaaagaaagaaagaaagaaagaaagaaagaaagaaagaaagttcccttcttagttttctaagagatttttgtttgttttttggtgttttattaaggatggctgttgaatgttctcaaatgcttttctgcaccaattcaaatgattgtatgacttcctcctttttctttgttaataagattaatcccattggttgattttctaaatagttaaccaccctcacatctcacatgcctacaataaaccttaattagttgttgaattagattgtatttccccagaagctgatactaggtcaggaattggagtacaaataatttatttgggaggtgaaccctgaaaataccagaagaactatgaagatgaagtcctctctgtctgcacatacacacatgaatgggacaatgaacatatatgaatatatatgactggacatacatatatatatatatatgcacatacatattaatggaaagggaagggagatatgtatttatattcatgtatgtatgtgttatatgtatatatataaatgtaacaataaatattgtatgtgtatatgtattggatttggtttgctaatatcttaagagtttgtggaactatgttcatgagaggaattggtctataatgttcatttcttgcaatatccttgtcaggttttggaatcaaggtcatctgggactcataaaaaggttatgggacaccccagcagagaagatggctgtggaaggccctggggaatgatggtgtgctcagaagatcaggaatgagaagagcagcacctgtagtggaagctgccagcctggctgtcttgggaaataatggccaagttctccctgttccctgtagatcctgtctccacagtggcatgatgaggggtgggaacatcaggttcagaaaaggtctttctgctctcagcttctcacaagcttaactgaagccccccsccyggggtgatagaagatatgacttcccctgagtttggtagaggcaagcatttccctttgaaagcttgttggtcattggtcatctccgtggtctcttctaaaccccaagagtcatccagggccatgcacccaggggctttttccacctctccattcagagcctttgatgccccttacacacctcttatcagctgttgaacaaactgtgacctgtctccaagaatgctggccagctgaggctgacaatggggcttggccaaccaaagtgatatggatagcaactggcagagggccaggatggcataaatgtcaaaaggtgcttgcacttgctgctgtgactgctagctgtggtcttaaggtatcttgcagaggagggggtaaaggatggtcccagaggcaccaaaaggggcaacaagcacagacatttttaactgccactcagagaacaacaactctgtgccaagccctgtgctgagggctctacactcacaatcttcttcatatacacatgggtcctcactgaaaccataacacagcagagtgggaagggatattttaaccaactaaggtgttcacttgccagtgcctgggatccaaagtnnnnnnnnnnnnnnnnnnnntaggaggagccgttggcttagtgacacatttaacttggagtacattcatcaagacatgcctggaaaaggccacagaggaaaggctccagagaggaagatagcactgggtgactgaactgaggggaccacagcttcataagaagggcaacaagaaccaggctcagcacttattctggtgttcactcaacagcatacaatgtcatcacattcactctcttactggaacctcctagggcgcccaggaagtcagcagggcaggagtcttctcccctctgaacaaatgaggaaagtaaggttcagagaggtgaggtgactttacttgccaaagacctattactggtatggtaggctaaataatggcccacaaagatgtccacatcctaacccctggaacctgtgaatatgactttatatggcaaaagggactttgcgtatgtaattaagttaaggatcttgaagtgagaaggttgtcctagattatctgggaaggctgtgaatgcaatcacaagtgtccttataagaggaaggcagaaggagatttggcacagacagaagaaaaagggatgtgatgacaagagctccatgtgtatatcaaggattgtgagtgtaaagccttcagcacagggcttggcgcagagtcattctctgagtagcagttaaagcaatctgtgcttgtcacccctttggtgcctctgggacctcctccgcaagataccttaagaaagagattgaaacgatgtgctttgaagatggaggagggggtgatgagccaaggaatacaggtggccaacctgaaaaaggcaaagtaatggattctcccctcagagcctccaaaagcatccagccctgttgacaccttgattttaggccagtgaaactgatttgttttggacctctgacctccaaaagtataatagtaaatttgcattgttttaagccactatgttggtggtaatttgttataacagcaatgagaaactgatccatctggtgagtggcagaactgggacagaagccagtcatctcatcacccaggcaaaggcagacgccatcatctgcttcttggcaaagtttcccagggcctggatagatgtgggagtggaggatgggaggacttcaataggaggcaatgatggttcggaagcaggaagctagctgctggaagccaccagcttgaagtcccttgcttgaggctcgtcatgtgattatccgaccgcttcaaggaagggactaggagcatggaggcagaggcctgtctttggccccagaagctgggacgtttgatccattgctgactgggtgagggtcctgctgattgagatggagagtccttagaggcaagactggaccgatgacttcttgaggtgcttttcagctctcaggttctgtcagtccctcttcatggaatcctaggtgccaaaagcagacccaggaagcctgtggccctgataacccaaggcaacctctgtctctctaaatgttcctgtggaaccgagtaagcataatcccagagggcagtttgggacagctcacacccttccagtggcggtgaaaattggtcattccccttggagagaggaggcgctcttggcaattttccagagctctaccctccttcccttgtgcccaaacagctgtgggcagatcaggctgggggtagaaaggaatgaattctattttcttccctccctgaggtactccatgtggtcacagaaggctgcacaggaaatataacggttgacagacgtgcggtgttttgtgatgtgaaaattaaaatcaccaggaaatgttcacgttctctctctccttctctccccccctcccctatcttccttcctctgagcctttctctctctctgttctcactcttcctctgttgcctttttccccccagttcattttaagtccctcaaacttcctacctccaagaacaactctctagttgaggcttggactttacaactttcacaaatcactttgaatccttaaggtgcctacagacctctcagtttgagcaattatgggagggagaacaaagaatcagggtgggcgagcttccagccaccactgccataaagttaagtgacaactgttcactcccaagcctctgagtctggacaggtttgaaaaatttgttttaatctcaaaaatctattcccaatgagcaattagaagccatttccttgagctcttactatatcccaaacttcggtttagttaaattttgtgaggttcaaattttgcaccttgagactctacttttctctaaatttcacaatttagggataagggtctgtttgtattcagcactgattggaatgaaaacatcattgagcttgccaagctgagacctggaataccacagcatgaggttcatatgttctgaatgagcaggtttcagaaagctgagcacttagatggtgaggcgtgtgacttgtaagatgtgctttctgtagggacacaggccatccccaccgctgcaccttcagcatctgtaaatggtacaagggctaaagtacttgcacgcaggcatttggattttcccctgtgtattattattggcgttatctaaggcaatgtccctatcttacttcataggtcaagagtatccccagggccacccagcaatgcctaggaatgaactcctagaatgaaaaacactttgggagattcttctatcaaccttcccttgttctataaatgtggacactcaggcctgaaagaggggacaggccctgcaacttgagatggctcagcaggactgggactcaggtctagctcgtactctccaccccaggcctagatacttgtccactgtgactacctccgggagccaggtgccagcctgggaggagccatatctgttttggagcaattgccccgggcatagcaaagaagggggttgagtatgagatagtataaggatggcatgtatcctttggtaaacaacaaatcttggggctggaaggctggtcaaaagtcagtctggagactggttttccacaacagaacgtgctgcgaaagagttgtgggcaaaactcggttttgaaaattgaatctttaacccccctgggtgccatctattgcaatcttatgagaactacttttgtgaagcaaagggtcttcttgtaatgcaaatttccactccctaattggcccggtgtgtaacttctatgccttcaattgctgaagggggccaagcccctttgacaccggtttttgttttggtttagcacaaagcaggtaggaggtagggtcaactcgcacctccctaatgctgccgctgctgcctccgggcgggagaagacccacctgggctccagggcagagctgggccagcttatcacctccccttcatcgccctgtggaggtctgctgcagagtagttaatcgggaagctgggagtgcaggtggcactctgtgccacctggagccatctccgagagagtgcccgcatcctccaaggctggagaggaataccaattgcacggttactgggccccctcaggagcccacaagaggaaattaaaaggcatacacacgcctggaataaaggaccctcttcttgcagctaatcactgaaattggtcactgggttgtcccctcccccctttggtgaaagacatggtctttctcttgttctgttccatcactgcgttcttagaaaagtgtgaggaggggggctaagctttgcacgggcatcctcccatccccgccctcaaggtctgcctttctctcagagtcctggcttttcccagcatggggggcatttgtttgtcctgtctgatgcaggagaaaggtcaatcccagcccctaggctatgcaggtgggaagagtggcctggcatctcttaagactgtctcctgcatggccctttgcaggttgtaaaatgcttgcactcccctccctgtatgggcttcacaacctcatcagggctcacagctgctattttaccttgagggcatggtctaaggtgacagacatggtcctcaggatttgaatccaggactttagctccaaggctaggataagctcttcccaccctctgtgctttagggcccactgtggccccagtccactcggcaatgggagagcctgtttgcatgcccttagcaaagcctgtggagccctgagggcaggggcaggaagatggccttggggctgccagggagatgcctaggaggttttggttattaattaattaataacactgtgtcccagcagtcaggctgggctggacctatgggagatgccctctagatacctgctgaaagcaagcaggaaagagcatgagacttactgtctcctgcgtgggaacagggggcggtgcttagtttcccctgctaggccagtaaaaggcttgggtcacctgattgccaaggccctgtgccacaagttctggagacctgatacaagctgtggtcttgcttcccactgtggccatagg

SEQ ID NO: 94474 - DNA, 28651 bp, Homo sapiens
tttggcttagatttataaaatagctgcttaatttggtttcccttcttccacttttgttcccctctagcctactctccacatcctagtgtgatctttttaaaatgtttatcctatcaagtccctgttctgctcaagctccttcaacccctaccctttcccatttgcacttagactgacatccaaagtgcttactactatgcccagcaaagccttacatgctccagctcctgtctacctctaactgcatttctacttcttggtctctatgctgctgtttactgttcattggtctacttcctgccaygggtctttgtccttagaattttcagtctgtatgccctttatctttttcatgcatgtctatctccctatctgttaggtctgggtttaattaaataccctatctagaatagatctcttctctctcagtatgttcttacaacatcttttctttttttggaggcagtggtgtgattatggctcactttagtcttgacctcccagctcaagtgatcctcccactttaggctcccgagtagctgggactatagccacgcaccaccatgcccagctaatttttaaattttttgtagaaatggagtctcactttgttgcccaggcaggtctcaaactcctaggctcaagcgatcctctcgccttggcctcccaaagtgctaggattacaggcgcacaccattgcacttggcccttttctttacagtgtaataatatttaagttgttgaatttttcaagattgtttccttcactagactgtaagttgtatagagggtagaggattgtttcgttctctgttatatttattggacttaattctatttaagtaagttgtatttaagtactgacttagatgtatttgttgggtttagtatccagttctgaaccaagcaatcagtgtttcttgaattaatagattcctcccatttgctgatactccattctatattaacatcacattccacttgcactattgcaatatccatcaaattaatctccagtctcctctaattggccttatatagtacttatacagtacatggttaaagtgttttttttaacctgccagtccccaggtcaaggatgcatgctattaatagttctcatttcttaactgcatcaaatctcaaactatttctgtataacatctaagcaactttgccttatcaccccctcaacaatcaaactaggtttcctcagtgtccccacacatgaacactaacaactctttcagtgctattaatcctcacctgtagtgtgagagcccctcctttctcattgctattcattcataacggtgtatgaatgtgggcctgacagctattgtggcaggagggcattgtgccaggaactctcctcattctgtgtgctaacaatatgatcttggtcaattcagcctcttttatttttatctgtaaagtggaatactgttgatacttcacagcaatgttgtagggatttcattcagtaatccacattaggcatctgtgtagcaccatacctagtgcatggtgagttcagtaaatgctagttgtttttgctcattgttcaagacccagttccagtcttccatctccagaaggctttcagctttttctcagatcctgcctaccaaggcttcagagccttggtatgggggaactaaaggtggttcttgcggagtgttgcaaaaagcttccaaggatttatccttgtgttaacacggtaggtcttaagtgagaaacagcatatagagtttagtggaaagaagatgaaatgggagtcaggagatttgggagttagcccttgctggactcctaactttctgaccctgaccctagtccacgcaaatcactttacccatctggccttcagatttatctgtaaaacgagtacattaaagtgtatagattctaatgattctttctagccctgctaagtactcagtatttaaatgatgatcaaaaaacagtgacaaaaatacagcatgacatggtttctctgggtcttttccttagacacctgaatctgaatactcttaacccttaagtatagagaacaacacaaggttcttaggaaagagatacactaacagccctgcagtgtttcaccatggagtgcaggccagactttaaattattttaagaataaggtttattgtctcttctttcctaatggggctacactttaagccatgtatgcagacttaagatgtattacaagcctttgatttacttggtaaagttatgtgtattctcttggggggataagtagtgagagccatgagttcctgttgcttttgcaaaggactttaatcatcatgtcatctttgtctctaggatccaaaccaagccgatgaagaagcaatgacacagatcatccgagtgtcctaaccccacgccatgtgatggagctgatcaaggtcatgtttctcactgttccaggaaattgatcaactcttccaatgggacattgatgatcacattctgccctttactacaggacagaaaccacttagtttttaataagtggcycagtattacaattgcagcgatgcctggcaaattgaagttgcaagcctttgtcttactctttcagtcaggacctatttcagactgttgatgacattgacatttcatggattcggatgatgcaaggagacacatgccaccccagcagtacacaaagcacttaccttgactggtgaagtcagccagccatctcagcagggaagaacaaccttctcaaccaaaactgcaatcaggaaagcagcagcccactccttcccatggaatctagacagcatttatccctctggtgggggaatctcacactgactaactgaatggacgctttgtattcagagatggcttccaggcaaggaagttctatcttgtgatacggaaacaataaattcctgagatacattcttccaatctgtggtaataataagaattcctctctgcccagatggtaggttgatatttctggactctagccaagaaaaagctaattctggggatagaatgataaaagactcaagcactaaaaatatacattgccgaatctctttttctagctttgaaaagttgtggcctgcttgtccctctgttgactggtcatctggaccatcgtacttgctgtggctacttctaagacaatgtagagggttattaaaccttgaaactgcctttcctaagtagagaacaagactattcaacaacttctttgctgaagcactgaggagatttgtaatactcctaaaggaagggccaaactagagattttcaatcatagactttgtgacagcatttggggaactaaaagattcatgtgtttcagcctagtgggagagagtgggggagaggaagagagagagagagcatgtatacccgtatgttatcatagagcacgattctccagtggatggatacctggaatggatcattaagatgaagagagtaattcacatttactctagaacctttaacaagcactgaaaggaagaagcctgagatttgatccttgacaatttctggaaagcactggtcagtcacactgtcctggacagagtccaagttacccactaaagcttgaggtggatgttggcttcactcctgcagcacaatgctggccctagaaagcgagcattttcattcttcccatggcagctgattctttggtgccagttttcatgttttctccataggccttgtgcagaaaggttttctcattgcatccatactgtgagaataaactgcagactgaaagaaacatgcctgcagggtcaggaactgggccactgttcccagaacgggttgtgcctcagaaatctatttctcttttagatgttgaaccctgagagaactaagatgatatttcagaagagttggctgccttctctggaaacaaggaaaacccaataattccgaggaacattgggggttaaataccaagaataaaaattggttcttctttgacttcagcttaactgtattaagacagaaattaagccctctaaaaacaccacaaagagagatgattgtaatgatagaaatagaggtacagagctatgcaaaggaaacaggaagtgaaatattcctagtcccagggatctggtaatcgctcctggcttccagatgtcaaaggactgatcctttggtaagctcactagaaacttctagctctacaagagtttgggatattaatgttattcagtaagtcccaagtttttcagagaatagattactaacaatgaggaatttatattccttggttaatttaggagtctaagatgcagagttcagaaagaaattactcagacctaactttgagtgcttaagctgccaacagttagaagatgctatttatttgtgtctgtaagtttgtacatagtaatgccagccttgttgctgaattttttatttggggggagatgactttgaattttgtttgaaatgcttcagttgtcattttgtcattgcatttcaaatagctcatgacccttttcttgtggtcactttggcacaccatagtagcccacaaagtgggggcagggtattgacatttggattttttctttgatactagttcttttattcatttttatttgtgactgtagtgataactttacagatggagaaagagtgaatggatgaatgaataattggtttaatgcctagttatgcaacttgagtgcttttttttttttttgcaggataattttaagtgtatatattttaactgcactggtacattgaacatgtcagtgtcgatgccactggaccaacagagcattttgtggctatagggtgcctgataataatgtcttgatttttctttgggattcaactatatcgaaggtttttcccccagcagtatgggggcgtacaggtgatcgatcattaatgtcattgcaattgttattttttaaaataaatttataaaaataaccgaaaagtaatgtgacttttgaggaatctgcaactcctgggttctagtttgtgtttccagtgttgaaattttgatctcccccgacaagacttgtctgcatggacggtgtctctgtaaacagtatcaaacttgtaatgtctgagcctcttagctttatctccccttaatttcttcccttttggcccttccaccctgttgaggagattttttctgtcacctgcaggctgatcatacatttgatgctactactgaaagtgtttatcaaaatgtgatgaagtaattccatgaggaaaattagccgttatcacaaaaacagccttaagtattgtagaatttcaggtagtgaagatgtactatttacgttttgttagattttgttttggcagaagaccaaaacaaaagtacttttctgattgttaaaaatccacagcatgctcaccttgttactgttttaccttacggtcgctgggaatctaagcaacaaagactagaagcctccgatatgccattatcaacacacaagagacaaacagcccgaggaagcactcaatgatgagagcagtagacctgccctggcagatgagagaggagaaactctccacaatgaaggaaaagcactgacagtatttgatagctttagtcaaactgtgcttgagtttggcttagatttatgccagtggaacctgtccttaccaaattcagagatgacccaagattctactctgtggtatgagggaaagacctctcgatatttatctcacaccaacggctttatcgtaggagcgtcttcgcctcccccgtttccagtagaaaagacagctttgctcctttgaaagcgcagaccgccgcacctccagccccttctccccgsggaagtaggccccgctaagaatgtgggaaggtggtggggcggcgactgaagtcgcttccgattggcgttgtcccaaggaagcctgcgcggattgatcggcggcaggcctccaatagagcctgctaggcggattggctgctacgcggctgggccctgtttccggtacctaggcgggcagccatggtgaccggcgagcggcatgcgacgcmgcctctgtggcctgtggaggcccgcttggcggcgctgcttcccgacctactggtctttcggaagcctcggggatgggaacccgagctcgccacggcccagggcgtcctcctaggcgtccatgtgacgggtgagggcgacggccggcacttgcacttaagtctcctggcctgcgggagaggcggccgttgggtctaagcccctggakgcctcgacggttacaggcctagcctcccgcgagctaaggcacagtttaacttcgtgctgcggcttccttaggaaactttgagtatcttcgttttagcgtgggaggacatcttttgggatgaaccggctcagtccttgagctcaccccaaagatgatgaaattgaaactcagaggaaaggatttttacaggaccacgcsscgggctttgaacccgtttttcccaaccccgagcattttctattaagcgttctgtttcaattattttattcgttcagttaattcgttcttggcgtcataagtatatgcccgccgttgttctggccgtagctatctagcagccactccgcgagtcgttcatttaacaaatacttactctgtgtcagggatatgaagatgggtaataccaggtgcctgtcctcactgtgtgagtggttctctagccagacatgaggagggatcctattgtttcccatagctaggcagcctaagagagtaggggaaagagctggctccagatgaaaagggcaccatctccagctcttggaagcagagagggtggwcctttggattcccagtggcagcagcaaccaacctggcccttagtagtttctaagttacaccatgttaatggataaaggaattactcagcttgaagggatctgtttcctttacactggcctgatgtgtggggagaaaggggccaaaaagtttaggatttggagttaacatcgtaatttctgctttgttggtcagggtttacagcattaatggacaggttcaccctgacctacaagtcggaacgtgacatggacaaactggcccatatcttcagttattacattagtgacatcgtggagcgtgagtgatcattgtagggtaacaaggtgtggtgctgggctcctgggggtttataaaagaagggggccagaagtactttaaaacaggtaccaaagggtcattcctttagcatcattcatctttggtttcttcaagttgccactgaaaagctagacctttgcctattatctgctaatctacccagtctcacattctattgactcattgttcaaagggggggcaggaggagctaatttcctttgcacatttgtattttatttcaaaataaagtattctcttctaacaataacgtatctcaagtgtgtattcagacaaaatttataaaacatctttttattattatattttgatcctgtgaggaaggaataggtgttttcttattttctgccatgtattaagcttttagatatttgccagatatccagtatctggaaaaaactcatttatgtagtacccatgttttgagtacctaccctgtgacatggactgtaataggtgcaggcagggcaagaacccactcttgaactttttagttaggcctacccaacagaaattactctgaccttataccttttagtacttacgtaacattctcatcctttactgacagtgccctgtatgcttccgtccatcattctgagattcaccagaataattactttgaggcatctccgttaagaatttgattatttgacttacctcttatccttaaggaacacatggaaggtcgtttgctttttcttataggtttggatgaaggggaagataaacattctatatcgtgtatgtactctaataccagcaacttctgggtactagaactacaggggaaagtaagacagagtaccctcgtggagtttccattttagtgggacagacaataaacacaataattgtagcttatatattctatcaaggaaataaacatagtatagtggtaaaaaaaaaacacaaaaaataattttagggtaggggagtatatgagacagggtggtcataggctcctctgaggaggtattatttaagctgacacttgaaggatgaggggaacagcttgtgaagaactaggggtaaagcatttcagacagaataccaagtgcaaaggtcctgagacaggagaaagctcggcatgctctaggagctaaaagaaggccagtgcaggccaaaacgtagctcgcagggtgaagagtggtttgaggcaaggttgggggatggtagctatgagaccaccacgctctgtagtccatagtgaagagttggaattatatatttctgtataaaggaaaactgtggaaaggtctagcaggggagtaatatgatctgattaacactttaaagctgattttggctaccttgtggagattgaatgctggtggaaagtgaatttaagaatagaagctggaagaggcaattgtcctggaaagatgttggagatttggtctagagcagtggttctcaacctcagctgtggttgcctgaggagctttttaattgttttttcttttttctttttttttttttttttttgtaagagactggggtctcagtatgttgccaagtttgtcttgaactctagagcttaaaagattcttctgcctcaacctctcaaatagctaggactgcaggtaccataccaccttgtctaacaaaaaatcttaatgcctaagcttcaccccaggccatttaaatcggactttcttaaggttggcccaggaataagaccttttaaagtttcataggcaattccaatgtgcggtcaagactgaagattgttggtgtagaggtatggcaggggagctgtgtggggtagattaacctgaaatatattttgcaggttcaacagacaggagttgctaatacgttgaatttcagtgggaagtggtgagaaaaaggactcagttttttggctttcataaatgaattgatcgtgtcatttaccaagacaggaaagactgaacattgagaaagaaaatcaagagttctgttttgagtatgttgagtttgagatgccaataagtcattcaagtggagaatgactccattcaagtggagaatccagctatgattgagcctggagctcagagaagagatccctgttagagatgaaaatgtgagttgatggcataaagtgggacttaaagttaagaaccgattgagttcatgttgggagagcataaataaagagaaagagcctttggctgaggcttgaggaactccaggggaggattatgataagggagaaagaacctgaaaaagagactacaaacagccagtgaggtaggatattgtggtgttcctgaagccaaaggagaggtagtgtctctagaagaaagctgcagctagctgggttgaaaatgacagctgtcaagtacagtgaggtcagagaggtattgaatttagcaagattaatgctgttgatgaccttgataatttgaagtggtggaggtagaagtcagagtggagtaagctgagaaaaagaatgacagagaaaacatttaagaggaagagtaaatgggagatgaggaaaatatatatagccaacttttttgagatttgggggttttgtttgttgtgaatgtagcaggaaaaaaaatggagctaataggcagaagataaggtagaaccaagaatatgtgggttatttttgtgtgttttggttttgttttttaagctattgatgagaatatttcagtagagagattaggaacggtgtgaagttcttgagaaggtaaaaggggataagattcctatcacaaatggggtggctttgaagagagcaggaattcttccattttagaaacgatgtatgtaggtgcagatagatttggggagaaaatgaaaagaaggaagaaggagcctgagtcttggagtgagcaaatggacaagaatgatgtcaggataaactcagtaggccattcttttgaccatatatgattctgccctgatctggtttatatctgattttgactcattttcctctctcttccttacttgatttcagatgttctctgttttggaggggatatcctaaatatcacaggtatttttttagtttttctgaatacttaaaagactgagtgaggaggactatatttaggtggaattcagcatattggtttattcagcattgtttgattaataggtactggaccctggggatacaaagatgaggaagacatagtctgtgcctcaaaggatcccccagtctaatggaaaagctttgcccaaattaaactctcacatgctttgcatttttgtttagattgaaggacagcaaaataagtgccaataaagcgttcttgagaaaactaatgagaaatttggtcattaatagcagaagctaagcatgagatggggaggagttaagcatgtcctatctggagaactcaggatcactaacagctgtatgccccggagttggcctgtcttcttatttaaacataataaaaccagccatcaaattagatatgaacttgaacccacattttatgaatcttttgctagtacctctcctcctctgttagtatactggtggaaggaagattaccaaaaatatccttaggatcatttaaacttctacctagttacgtttttactgaatgattttgaggatctgaagcagtattttaacctagcataatgtatacagccaagaaaccttgcctgataacttacttgatatccacactgggtcaagttgatcttctgcattactgggactttgccctggaccaagtaagtctagatatttggtccccatcagcctatcctgtgtgtctgcagggaacatrctcctggcactctggagagtagaacaaaatcaactgagtgacatcattaccttggtggcaaaatgcagtctggagatacaggagaaatttgggatctatcataccagggaaggccaggacctgcagttaaagataggtagtacctcctaaaagagtgatccagttgggcaagggggaacccactataaaaacctcaaaagataaatgataaactgggaaaaaatgtttgcaattcatatagacaaagggtgaattgctctactagggaaagagcacttagaaatcaagaaaacaatagtactcttaagagaaaaattggacaaaggacatgagtaaattgtatatagacaaggaaatgcatgtcttttaacacgtaaaaagatgatcaacattcataataagaaaaatgccaattggaagtacactgactacctgtcttacctatagataggcaaaacttcagatgctggacaatgtactctttggtgagtctgaggaatgagctttttcttactgtgagtgaacaacggtataaggtgatttggcaatctttatttatttttattgtctattgtattttttatgtcaacaaaaactaaaccatataaaaatatatattaaaaagtcttgttttcacttatataccatctatactatttactcttacaagtgcatttattccttaacctagcaatccttctggacatctataggtatacgttcacacatctgaaatgttgcatgtgcaaggttattgattgtaatatggtttgtaattttaaaacattgaaaactatttataggagactggttaagtaaataatatgtatactcaataagattacctgcaacttaaaaaaaataagatgtcttgatatggcagtatctccaagatacagttaagtgaaaaaaagtaagatacaaaacagcatgtttagtatgctaccatttgtgtaaggaggaaaataagaatttttcttatttgtttatatctttttttttttttgagatggagtcttgctctgtcacccaggctggagtgcagtggcgccatctcagctcactgcaagctccacctcccgggatcacaccattctcctgcctcagcctcctactgagtagctgggactacaggagcctgccaccacgcctggctaatttttttgtatttttagtagagacagggtttcaccgtgttagccaggatgttctcgatctcctgacctcgtgttccgcccgcctcggcctcccaaagtgctggaattacagacttgagccaccgcacctggcctatttgtttatatcttgtataaagaaacactggaaaaaatatataagaaactaataaaattactaatatcaggaaaatagtaaagatggtcatgtaggtagaagcaagattttaaaatacatattctttcatatagtttagtttttgaactatgttattgcttgacagaatcaaaaatataatacaatataataaaaattaaaaagctacatacaggggccaaagtttcaccaatggcagagtcaggattggaggcgaagctcaatatacaaagctccttcacaagggttcagaaaactcctcaagggcaaaagttggctccagctattcttttatgttttgaggagcagtggtaaaggattatattctgtcttatatggcatctcttttgtcctgccgtcttttttgtttcttttggtttttgttgtattaaggataattgatactatacattggcatatttatacacttttgaaaccatcaccacaataaagatagtgaacatacttatcactcaaaaagtctcctcgtgcccctttgtacattcttccactactctccttcaccatctccagacagacaaaatgtccatctccaggtgtattatataagagaaggaaatctgggggaagaattttttttttttttttttgagatggagtctcactctgttgcccaggctggcatgcagtggcacggtcttggctcactgcaacctccgcctccagggttcaagcaattcttctgcctaagcctcctgagtagctgggattataggtgtgcaccaccacgcctggctaattttttttttttttttttgkatttttagtagagacagggtttcaccatgttggtcaggctagtctcgagttcccaacctcaggtcatctgcccgtctcagcctcccaaagtgctgggattacaggcgtgagccaccgtgcctggccgtaaggtattatttttaaaggttagctcacctaagacttccgcagctgagggcagtaacaagataggcatgatgcacagagccaygtggggattccagacccctcctgttgcatagtttcccagttgaatttgactcttctccatttatctcatytttttctggataggtctacctgcaagtcggatttcccaggttattgttggagatgagcggcagcaatacctcttggtgattgggcaggttgtagtgatgtccagttagctcagcgtttggctcaggcgaatgaaattgtcctatcctggaactgctggatgctttgcragcagtatatgtttgaagtggcaatcatgagggaggatgaagctgtgaaggtaggaggctagcttcctstactgccattctgaaaaggccttcctagtacacagcgcaatgctctggtagtgttcacatattgcctggccaaaccaatgaccattggaactcaatttaggagggaggctgggaatattctcctrtgaagatagatgaggtagaacagtgaggctgaggagataaaaggcaaacaagggcaatagaatcctcagcctttcttgtgtgggggcacagaattaaacagtttcctttctgtagttaagagatatgtggatcattgatccatttgattttgatgagcattttgacaagtgcctcaattatctaccacattaccgtacgagtgctggtaagttactttgtccttcctacctaagccccaaattttaaacattaattttccacatggccagggacattttgtttttcttttctcagagactcttaagaactgcactggaattggatccacactctgaacttgaccaaaagctgcagaagcacataatgaaaaaccttttgaagaagcttatttcctagttcttgaatcctcatagagtctctctctctctctctctctctctctctctctctctctctctctctctctctctctctgtgtgtgtgtgtgtgtgtgtgtgcatgcacatgcataaacaggtgtacaattataagtgacaacttttttatatttatccagttaatctccagcaacccattgtaattccagcaaatttacccatctgtgccaacataatactgtgatgaacatgtcttaaacctttagttagatttctcagtcctagaaagtagaagccatatttgttctttagtttgttctttaacaatttagtacactgtaagaagggtatagagtgtatgtttggtaaatataagttgactgattgtatatatatgaatatatgtgaattccttagtaagagatgtaatgactaatggatgtgtcaaattaaytcttagagagtaaatcttgacagatttcatcagtgaattctgcctaaagtcrgttttaattccaagttcattggtttgtatatcttctatactgaattttcttttaagtttttgctgagacccataagttgttttctcatacataccatgaaatacataattaaaaatgcctgaacatgatgttgatagttgaaaatacaggtaggtaactcaatgtgtctttatagattgatgaaggccagcctatagagtatgtatctgaattccgtacgatgactctggttttggtcagcctagagttccacaggacagcgtggatgttgcatttgtgtcatcttatccaggaggctgccttatacatctccacagtcattgagaaagggggcggccagctgagtcggatctttatgtttgagaaagtaagtacaagggaacttgacccatcagcattaaaggtgagtgaggagtaatggtcttgtacaaccagttgatctcccacataatgcaagtgtaagtcaaattccctgctacttattttgtaacaagctatattacattaaaacttcaactaatgttaattaaggaatgggatgttcctttttttttttttttttttttttttttttttttttgaggtggagtctcgctctgtcgcccaggctggagagcagtggcgcgatctcagctcactgcaagctccacctcccacgttcatgccattctcctgcctcagcctcccgagtagctggggactacaggcgcctgccaccatgcccggctaattttttttttgtatttttagtggagacggagtttcaccgtgttagccaggatgatctcgatctcctgacctcgcgatctgcctgtcttggcttcccaaagtgctgggattacaggcatgagccactgtgcccggctgggatgttcttgttaatttaattttcaaggttactgagggttactctccatgtcattttttattgaattcttattgaagaatccttgtgaaagcataaagaatgtttttctggttctattagtaaattaaatgtaatcaagtctttgtcagataattaaagatcttgaaaaaaagcagaatcttaacacttgacattataggtgaagaaaatgtgggcacatagactcagctcaaggtatatactagaaattaaatttttgaaaagttcttgatagcaatttttcttgtgttttaaatttcagttctttgaatagttaaatcaagatttttgttaatgtctatgttgctggccaggcacggtggctcacgcctgtaatcccagcactttgggaggctgaggtaggcagctcacaaggtcaggagatcgagaccatcctggctaacacggtgaaaccccgtctctactaaaaatacaaaaaaattagccaggtgtggtggcgggtgcctgtattcccagctacttgggaggctgaggcaggagaatggcatgaacccagatggcagagcttgcagtgagctgagatcgcaccactgcactccagcctgggcgacagaatctcaaaaaaaaaaaaaaaaaaaagtgtatgttgctgtggcccagcatttccattttatgaatcatgtagaatctgatatttccaacagaagagtgttcaaggatagggtctgggttcattcggtggagctggtttagtttaggcaagccacattcctttcccaggtaagtgtctcatttctttgtttgtcatctatcccagggctgcatgttcctctgtgttttcggccttcctggtgataagaagccagacgagtgtgcacatgccctggagagctccttcagcatcttcagcttctgctgggagaatcttgctaagaccaactgaggaggaaggtggggcagagaggagcttctcaggccccaggggctcttcaggcagggtaggaggcagtaacaagtggcagggattcaagtagtccagaatctgcctaactcggagggaacatgctaaggaaagtgagcaaacaagatctattaagaaatcactagatacagatctctgtactggatacccaggggaaataaagatacattcccattcagcgggtcaggaaaaggggagaaacagaacagacataccaagattcgagaacactgcaagggaacaagcaaatgtgtaaattaatgtgatgcaaataacatgcctgtggagaggatgcagaataaaggctgcctgtctacgagagagtatgagagaagttgtggagaaattacctagatagaaaggaaccacagctggttagcactctcttggctttcattctgggtctttcccagatcttattgctttttctggaccttacactgaactgatctccctcttccacatccacgcctcacccaaccacctttcacaaaacctaacccagatgaaggtatagaaaaatctattttcccactagttgcattatgataaagtttgttggaagttttcaattgactttttaaaatagaaagctatggagaaagtgtatacatgaatgaattttaaaaatagttacttccaatgttaacatygaatcagattggtttgcttgccacaacttattcaaaatggataaaaattatatcaaacatgtacatagtactttaacatttatagaatactttagtatatgctaccaatgtgaaaatttgtatccctctttattttttacttttttttagagacagagtcttgctctgtttcccaggctaaagttccgtggcacaatcacggctcactgcatcctcaacctyatccttccaagtagctcagactataagcacacgccccacactgggctattttttttatttttagtagagacaaggtcttgctgtgttgcccaggctgctttcgaactcctgagcccaagcgatcctcccacctcggcctcccaaagtgctggaattataggtgtaagccactatgcccaggtcctcttttatacatgaggaaataaaagtcacagaagagaagttactagcatataacagagcttgtaatgaaacccagatcttcagtcttcaaatcctgtgttgtttcattacttatcccccacctgcctcttataaaatgcaaatgctcccccaaaagaatagaatatgctattaatgtgatataattatagatacacgctcatagaatgttactattggaaaggaatttagagattatctgatccaagccttattttagagataagaaagatgctacagttgcttaatagatactcagactctgcccaaggcaaatacatgttaacacttctttcaggtttggtgggatctgcagatactcctatatcctacctcccaatcttatctccagggtggaaatgctgggcagtattagtcagggttctcttagagggacagaactaatatatatatgtatatataattatatatattatatagaactaatatatatatgtaatatatattatatataaatatatatatatgtaaaggggagtttattaagtattaacttacatgaccacaaggccccacaataggctgcctataagctgaggagcaaggagagccagtccgagtgccaaaactgaagaacctggagtttgatgtttgaggggaggaagcatccagcatcggagaaagatgcaggctggaaggctaggcctgtctcgctcatttcacatttttctgcctgctttatattcactggcagctgattagattgtgcccaccagattaaaggtggatctgccttccctagcccactgactcaaatgttaatctcttttggcaacaccctcacagaaacaacgcaggattaatactttgaatccttcaatccaatcaagttgacactcagtattaaccatcacatgggccatcccttccagtgctggtctgttctgttcttgaagtttgtattgacctatggccttcaaggtcccacccttggcccttactcttaaaagagtcatttctttgtcctttagagactgtcttaaaattcccttaagaatgccttccatcactcttaggctgtaacttggtcatttccatcttatttagtttagaatataatagatgttaagaactagatggggtattagagttcatcaaatttgacctctttaaagaaactaagatccagaaaggttatgctggtaagccaaacagatgtcaaagcctcaaagctaggtttcaaggtcagtgatttttccctcgaagataattactaattcaatatctcccaaagtgtgtttggtagaatgttattactcccttaatatgctcatgaaaaaagaaaagattttcatcaccaaatatgtttgggaagtgatgcaaattatatttccttcttcaaggttcacaatgaacattaacatatcaaaggttctgagtagtgctatgggaaagaaatttgttatatttagttttagtcagcatttcccaaatttacttggtcatcaaacacttttctccagaaagacctataaacatccagaggaactaatgttctaaggaagatatttttggaaatgctgagcagatgctaaagcttcagaggtacctacgtggcctcggtagcagataccattgctcatttctctctgcattacatgagctctcagacccaaaactactttccatgccttctttttcaaagaccctgttcaccttgagatatcctctgaattcctcttcctaatctgagaaatagctccagcttttagctcatttagaggaaagatgattccatgcatatttcttcaggatatttttgagacatagggagtgcagtctcagaatatcattattatggtttttcagtaccagaaatactttatatacaatgacatatatcaaataaagagtacattctttatcaatgcagaaaggttttaaaggaaagaaggaatatggattgccgggaaaaacaaggaggaattataaagtataatagaaagaaataagaaataactaagtgataaaagtattatttgttcattattgacttgctaatagctgaatttctggcatgcataaatgcattcattcaacaagcattccttgaacacagttatgagccaggcactgtgctaggtgctatggacataaagagaaataagattttaccagttcagctaagtaaacaactaactttaatacaacgaaattaaagtgcagaaataaaatgctacaggagttacaacaatgtgctatgggaagaagtggttaattctccacagaggtaccaaagaaatcttgactataaagatgacttttgagacaggttgagaagaaaagtagttcagcaaatggagaaggtgggaaagggtatttaggcagaggaagcatcatgaaattttaaaagattttcagtcttgctcttcatatggcagcagaactgacagcatggtcttgtcttaagtgtctctttttttcaccctgggggcagtgagctgagtgaatgaatggtaagagactttttttttttttttttttttttttttttttgagacggagtctcactctgttgctcaggctggagtgcagtggcacaatcttggctcactgcaacttctgcctcccgggttctagagattctcctgcctcagaatccctcaactgggattacaggcacacaccaccatgcccactaatttttgtatttttagtagggatggggtttcaccatgttggccaggctggactcttgaactcctgacctcaggtgatccgcccacctcagcctcccaaagtgctaggattacaggcatgagccacagcacccagccaagagcccttaatcctgtcctttgaggaagacaaataattttgatggcttaggaggtaatagtgttaacatgattgctacttctcatgttgtctgaaccactgaaaattgtttatagatttaatgtgactatgcctcattgcataatctttctccacctacatatcttgttacctgtcacatgaaattttcatgtcagtgagtaaatctacttattttgttatgtatgagttgctccttgccacctttgggcttttgcctcacctagaacagtatatgtcctcttttaaaataattcatatgtctaatactcttccatccctagagaggtgagactacttctcccattacctctctctaatccaaacacctctcttcacatctgtgctctagccgtcttgaagtacttagttttgcatgaccacacaaggcatctcaaagcctttaccttttcccaccagacagtaccactcccccactttagcagtttcttcagctttcagggtccgaccaaatgtcctctcctttaagaatactctatctactcttcagtgtgaattagtgcatctgttctgtttgctctgctaatgtgctatatcaatctctaatatggagtatttgtcttgctgacatatataagtatctcttcccctccctcaaacctaccaccctcctccccaaacttaacttctctagggcaggatattttaaacatccagccaagtactcagtactatgcacacttctcagtgcttagtgaatgaaatgaatgtatgtatgcattaatgaatttttaaaatattactcattaaaaaaaatttgttccaaatgttaatttacttcagaaagccttctgtctgcagtcctgacattctgatcactccttaactgtgacattctagcattatttgatctattaatcctgtattgatatctctttatctactttcatttttcagttttatctgagacaacatggtatagtagaaataatatcagtctaggaggcaagaggcctggattctcattctgacttactgttcgtttttgctatataactctgggaaagttaattaaccccttcaatttttttttctcaaatggtttttaaatatttgccttaccacagatgtaaaattttttttttttttttgagatggagtctcactctgttgcccaggctggagtgcagtggcacaatttccactcactgcaaggtccgcctcctgggttcatgccattctcctgcctcagcctcccgagtagctgggactacaggcgcccaccaccatgcctggctaattttttgtatttttagtagagacagggtttcacagtgttagccaggatggtctcgatctcctgaccttgtgatccacccacctcagcctcccaaagtgctgggattataggcgtgagcaccgcacctggcccagatgtaaaatttttaaaaatcttttactggccaggtgtggtggctcacacctgtaataccagtgctttgggaggccaagacgggtgtattgcttgagcccaggagtttgagaccagcctggacaacataatgaaaccccatctctctcaaaaaaaaaaaaaaaaaaaaattagttggatatggtggtgtgtgcctgtagtctcagctacttgggaggctgaggtgggaggatcacttgagcccaggaaacggagattgcagtgaactgagatcacaccaatgtgctccagcctgggcaatagagcaagaccctatctcaaaagaaaaaaaaagaaagaaaatcgtttactaataacccccaactaaaactaaaactcctgaattaggggaaccattctgtttcttttggttctctccctaatattcagtactttgtagccctcatgttatatagactgacagcaacctctggccttttccattctaagctctaaaactagacttctggatctggggagtggcagatctagtgcctgacttggaggcttctgactgtatgtttatccattgttgcttttcagatccctagatttgtttccatcagtatcactaatggaccagtattctgtggcgtggttggagcagtagcaagacacgaatatacaggtagaataggacattggactgttatctttgtgacttaagggaggaaggtggaagacatggcccaaaaattctccacctgtctttctgacacagttattggcccaaaagtgagtcttgcggccagaatgataactgcttatccaggtttggtgtcctgtgatgaggtaacatatctaagatccatgctacctgcttacaacttcaagaaactcccagagaaaatgatgaaaaacatctccaacccagggaagatatatgaatatcttggccacagaagatgtatgtgagtatcattgtgtgatagtttcattctcatctcttacagaacaataagtttttgattacatgaaattggaaaaaaagatgctgctagtactggcatgctggaataagacacacaaaaggagtgtttagtgtctgagagatttagcttttatgtttagctcttagctagttcttcaatgaacatccttttctcctacaggaagagaatagcaataggtcactaacccagatcttctttgttctttttttctttgtgtacttcaccattcatttacttccccgagcctggaacaatcaataatattccctctttactccctctcccccaaaatttttagtttttaaaaacctttttattcagaactctgtacctccttaattatctgaaagtatttgcttatgaagacagctgttcctaatctatttttaacagatacatttcactttgttctttttcccagaatgtttggaaaaagacatttggcaagaaagagaaacaaaaatcaccctttgttaggtatgttttcttttgtaacttaaatcatatttgtttcagttatagacagctaaatgtgatttaaaaaacaaaacagtgcaagactaaatgctcttaagctttattaaaaaatagagagcaaccttcttagtgaaattatatttattttgaagaggatttactatttcttttccatgtcaaatattcaaatttcaggtgaagtcctataactgcctgagaaacaccaacatttagtaataatctttgtaagtcagagtttacctattgagatcggaacagcttattgtggatcatctttagagaaaaattcataatccttagaatagtgaaaatagcaccaagactgttgtcacccacgctatatattccctatctttgtatttattttagtctatacttattagtccattacttttacatagtagtgacagattttgaagactaaattgttattaagaaaatttttacaaaaagctaagagacacccgtgtccacaaggtgcctaatttttctgaatgttactacttaggctctggaataagccctcaagaccagcatatattagctcagaattgattttttggaaagagatatgaagccccatcaatgaatgagattcttctgggaattctggaggaaaaaagccattctgagagttagatttgcaaattgattcaaatcaatagagtatctaccaaaaagcctgcaacaatcaataatgttgattattgttatccaggagtgttaggtgctccctgtctctctacagactgggagaaagaattggaagccttccaaatggcacagcaagggtgtttgcaccagaagaagggacaagcagttctgtatgaaggtggaaaaggctatggaaaaagccagctgttggctgaaataaactttctggcacagaaagaagggcataggtaaaaactcctgctttctgacttagtcagagcctacttctcttggggcctctttctcttgttagtgagactcttgtgtcattagattcagcattcttggaccggtgaagttagtaacctatgtgtcgtacaggggactcctgatgaccatagtcatattcaccagggtgttgccattgatgctgaaggaagcagattccaagcagtgcttctatgccatccagaccctcatggccatcttctttgagattgatacatgcccagcctattaccggcaagagtgcctacaaagacagctttgtgggatagtggaagaacaacttcactgcctttttagtgacctcttatttgtgaaggtaatgaaggcagtggctttctgaattgggttactgttatattttgtggatagtcagacctaggattgttttctaatctaataacctgaggatatacatatacatatatggtaggaccaagatgtgaaattctttcaacaccaaaactcaggctttctccttttgaggagagtgaattctagtattgaacctgacacttagtagttttatgtcctagagcaaatcacttagcctctctgagtcatagctttttcacctgtgaaataacaattatattactgtatgtttttatgtgaattttaaaggagatggtatatgagagattgcattgtatattttaaagtactaaatacattaaggtggccctcaccagtggcatatccccaggaattatatccacgtgttcttgagttggttccaatttctttatttttttaaccctaccttcctgttcccttaccacagaatatatcatttgaaaccagcatctggatctcaaaagccttcagaggtctagggtttatggggtttccagtagtgaacaagctaaaaattcactggtccacaatttgttttatttatcctctgtcacttctcctaatctacccaccctgcagagtattttggaatggaacactaagatctgtctaatccctcaacatatccctctcttaagataggccttgcttgggactctaaacccttgcctacgtagattagcagtcatctcactttggctctcaggttcctgatagttcatgtgcctcagcctagcacaggaaacaatgttatgtgatgtgtgttgcatcttgttctgacaagtctcatgtacagattcatcctggtatacttggaataactggggtactggagctgcccaaactgtcattgctaagttcaacctgtcatttactccttagtcataaccctttaagggttttactagagtctggtatggaaaggagatagatatctgtctctaacccttcatgaatttcgaggttggctcccctaaagtggtcatctctaatgtgcaatcccttacttacctccctgcagctacccttcacaggtgctttggaaacccactttattgtgaggtcctatgccaggaccttctctctaaggacgtgttgctctttcatgtcctacaaaaggaggaagaggaaaacagcaagtgggaaaccctctcaggtaagcttagcttcccagagttctaccctggtccagctgctgaagctcattctccaacatgacattacttggcctttacgaggtacataccttttccttgctaacattgtgggccacactaggccttcccagataagcacactgtacaaatcttatacaagtagggtgaaaatactcaagatttgcttcagataacttaatccaatcaatctacaatagttccttttataagcagcccaagaggtagggctaggaaattacgatttataaacatgaaagtccagaaaaaagaattgtacactattgatgagaaggatgacttgaggatttggatgggggatgggagaagggaggaaattaggagaggaataaagggtagaagtatgtataaaagcagaaggcatcccagagctgtgatgtaatagaagcaagagctgttataaggtgaacaggaatagtgattagttgtaagataccgattggtacagagaatgttgttagtttataagagaaaattagagaacaggcagacaggtggggtaaaacactttaaaccatggtacactccagtcatcttcatcctttaggtttttttttttttttgactaaattattatatttttgtgcctttaaaactacagtcactgagaatggtgctttcctcagtcatagcctgttttctttatagccaatgccatgaaatccataatgtatagtatttctcctgccaactctgaggaaggccaggaactttatgtctgcacagtcaaggatgatgtgaacttggatacagtacttctcctaccctttttgaaaggtaagtcccttgaagacttcaagtgaaccaattacagatatcattgcaattagtgatttggtgagtagttgagtataggtctctcattatcattctggcttcatttcttctaaaaaagaaatccaccttctagaaataagttctggcattgcctgaagagctctttgaagacttgtaatgctacttgagtaaggttttacttaagcgagcttattgttctctttggggctgactgatgacctggaaaagttttccaattatttaatacaaaataggtcgtgagtttccctttgtgcatattcttgttccagagtagacagtaagcaaagaagatgatgttgctaagatttaagaaaatccatggtgttagtgaagatacaatgttatgcacatagcaagagtttaataaaaaaagagtgcaaagtagaatgactgatgccataaagaataatgaaactatcagaatcaggtaggcatagttggagaggggatgttcttcttagaaatgaatttttcttattttaatatttaattcaagtgtttggtgggcaaggtactaatactaagccttcttgaggaatattgtaatgaacagcataccttcaagtaaagtatggtcttgttgagaaaataagacacacacatgaaacagcagttcaggacaccatggtagttaagggccagggctctagagtcagaaaaccctgggcaccatgggctcctgcactaaccaactatggaactttgaataagttagtcaacttctcactcatcagtcaaatgaggataataatagtccctacctcttggggctagttgaggattaaattaaataaattatggcacataataaatattccatgactgttagctattatattataagctttttactctgaaggttttaggttcaactagacagtttacactgatagaactatgatagaccatacttaacaatggcttttcttactcagaaggaaatacaggatgctaacaggacaacagcaggtacttttcttcagtgagagtttttacaggagtttacatagcactccaggggctattctctggaacctcaagtaatagctcagctgtgaggaatgaaaccatgactcatgggtgcttagaggcctcatggaccaactgaaggccatatctcttataatggcccgaacaggcatcactttcaggctctgcaagaggcatgaccttttacaagaattattatacccaaggaagcccaaatctgtggcttgccaccagttcattcagttttcccagtccaaattcagtttcccaagcagaggttgttcttagcataagcaaagaagtttggctaagtggagaagggaggattgaggtgggagcagtagacaggggtagatgaaaagttttcatctttatttaaaaaaaaaactgtacacattttcaacatgatatattctagatttgtagaaatcttgttcactgctgattgactgattgattgattttggcagaaatagcagtaagccaactggatcaactgagcccagaggaacagttgctggtcaagtgtgctgcaatcattggtcactccttccatatagatttgctgcagcacctcctgcctggctgggataaaaataagctacttcaggtcttgagagctcttgtggatatacatgtgctctgctggtctgacaagagccaagagcttcctgctgagcccatattaatgccttcctctatcgacatcattgatggaaccaaagagaagaagacaaagttaggtaaggaagggctgttccctttttctcaggtctgaacaaagagtccctgtgggggtatctgtgttcagaaaggccatcaatatcatatatcaaggggttctctcattcgtttgtttaaagatggagttttgttatgttgcccaggctgtaactcctgggctcagtgggcgcataccaccacacccagtttgagggtctctctctcaaagcctatggctaagaaacagagagaaaattatcatttaaaccatgaaagagccatggatagtgaaaaaatatcctgtattttcagacttgtcttcatttcaggaattctagcgcctttttaacccaggtgttggtatttgtgttttgatttttggttctgaaaatattgacataatcttttattggcttctaggtgcaaagaatgagata

SEQ ID NO: 94475 - DNA, 83405 bp, Homo sapiens
  misc_feature (1)...(83405): n = A,T,C or G
tttatctatttgcaactgctgaaagtactgaatttaagtgtatcaacatcatttctgtagtttcaaccgctaagctgttgctaaaagtctgaaattctaaaggaagagttcaccttcaaatagcagaacacaagctgcagctgttgcttatttctctctctttttaaacaactggaagaactacctcctctaattttcattttgtattcactacttctacttgtcattcgtaaatcacttcagaaacaacgtgtcctagtgttgcctctctgctacacctgctcctcctcttgcccttctctgttctgtactgtagaaagaagaggttgttggttacctccatggcttttgttgacagagagtgacattcaggtgagttcagcttgaaaatgcatctctcattgcttaaagatgtgaactcttacagaaaattcattttctataccttctagtgatagcggttcagggacttggtatttaatcatctatgctcatgtgagatgcccttagtcatggtcattcatttgattgtgtgggagcctttttcatttatctcagaatctttggctgttttatcagctcatttacctctgtgcagctgaagcagtatgttatatatttctggatgatacggcataagggcatggacaagaggaaagttgcctagagaggataagttaataaactgggttgtaaatgaagatggtataagaaggaatgttggtgcagaagaataaggagcatttaaaaaaattatagtctaggcaaagatgcaaggacaacatgtctattcttcattggttcaacacatatggattgaccacttcctacaagtttggcatctgttcaaggtaatggggaataaagatcaataatgtaccattctaggcaaattcataaggatagaaagtagattagagattaccagggtgttggggaagaggggaatagggaattattgcttaatggttacagagtttttgtttggggtcatgaaaaagtttggaaatagatagagaaggtggttgcacaacattgtaaatggaattaatgtcacggaattgtacacttaaaatgaacaaacgacaaattttattatatataatcacaatttataaaaagtaataatgttatatgcacaaaaccactgaattatacaaatgagtgctttatagggtatgtgaattttacctcaattaaagttgttaaaaaattaagacactatttttgctttacaagagttcatgtctaatggagaaaatcaatctatacacaaattataggtattactaaaggacaagctatcaaaagttgatggttaagagaacatatagagagtcatattgtttcagttgaatcccttctctgtgtcactaaccctataaccttgaacaattccctttttatctttgagcctcgccttgcttaccaacaaaatgggtccagtattagtgtatacttcatagagctattgttataattccatgatgtaatctgcatatgtatattaaacatagtagaaatgtagtatattttagataaaattttgataaacgcagttatagcgaatatgcatttcaaagctaaaagcattgcgtagatagactcatacatgttatgcatatgcactgtgcatttggaggggagagcttcgaagtgattattgttcaaatgacagtcattagtatgtagtgccagtcagtatatcatcgatgagtaattttgatatagaaaaattaaaataatattgtcatcacaaaattcagtaacaaatagtctcccataaagaggggaaaaaagtttcacagacactagtgtaaatcactagtgtaaaaaactagtgttgatttacagtattttatttttatcataaggttacttaaatatctacaaatataaaataagcataaactctttatacttatacaacaatataacgtacaccaatttataaaataaatatgtcaaactctactcagctaataaagttcaaatcagaggcattactttaatgtgatggataatattgttttgctgatattaaactactaatctttttttttttttcttttttttgagacagagtctcactctgtcacccaggctggagtgcagtggcgtgatcttggctgattgcaagctccgcctcccgggttcatgccatcctcctgcctcagcctcccaagtagctgggactacaggtgaacacagccacgcccggctaattttttgtattttcagtagagacggggtttccccgtgttagccaggatggtctggatctcctgaccttgtgatctgccccccttaggctcccaaagtgctgggtaaactactaatcttaaagttaagagtggaaaaataaattttgagttttatattttaattgtggcattggttctcttatatttgagcataatgggccataggattaatcatcattacatcattcaccgcctttctgtttcaaaaatatactagcttttctcttctggacattggcgtaggcaaagaatttatgactaagacctcaaaagcaaatgcaacaaaatcaaaagtaaataaatgggacctaattaaactaaaaatcttctgcacagcaaaagaaataatcaaaagagtaaacagacaactcatggagagggagaaaatacaaactatgtatctgacaaaggtctaatatccagcttctacaaggaactcaaacaaatcagccagaaaaaaaaataataatcccatcaaaaagtgggcaaatggcatgaatagacacttctcaaaagaagatacatacaaatgacaaagaaacatgaaaaaaaatgctcatcagggaaatgcaaattaaaaccacaagataccaccaccttatcccagccagaatggccattattaaaaagtcaaaaaacaagagatcttggcatggatatggtgaaaagggaatgcttatgcactgctggtgggaatgtaaattactgttacgagatctttggggtgtcacttttctggctagaaacctgtggccagtgacgcctttgcccgagttttactcaggcccgctgggcttgttcctctgttttggcctggcaggctgcactcagctcatgctaccagcctggatcccatgtctccaagggagactgagagtcaggcatggagcagcgaggggtgtgtgagtgagcgaggggtgtgtgagggagcatggggtccagtcactgtgtagtcagacacgcctgctgctgccacagggtaggcagctccaggtgccagcatgggcaccagctgtctgtgaggctgtggctgaccaggcacactggaagcagcttctccagctggcaccagggaatgcagtggtgcctggaagcttggagatgccaggaactgcagggccccaaagagggagtcatagccctgactcagggagctcccaggtctgggctccctgaagggctgcagcttttctctccttctcttcacccacaacgtggtgagcaaggggcatgtttcagccacgtttgtgttacagctcttttagcctcgccatttggtgggtcctgagttcttgtcctgcaaccaggaagaatgaggtatgcaaacatgtggaaggtgagcaagatgaagagaagctttattgagcaatagaacagctcagagaagacccacactgggcagctcctctctgtagtcagggtgtcctgacaagagttcagctcctagcagagacagtagctcctctctgcaggcaggtcatcccaacaagcgttcagttcagtgttcttgtatttttagtagagacagagtttctccatgttggtcaggctggtctcaaactcccgacctcaggtgatccacccgcctcagcctctcaaagtgctgggattacaggcgcaagccaccacacccggctacctggctacttcaattttaagaatattaaataacacgcgcaaaatgcttagcacaatccctagcaggcagttatgcattcagtaaacgttagctaccatcatcattatattatgatttgtaatgatatatttattcatttgactaagtaatgatgcctctcacttccaccagactggagtctccattagggaaggaacaatgaagtccttactccagcagggtagagtgcctggctcaagtaagatctcaattaatattagttgaatgaacagatttacagtctcttcttgaatgcaaaattaattgccatgtaatattcctttgctgggctgtatctagcaacactgaagtctggcatggcaagatgcatattgcagttgtgacttaagatgacaattgtctgagtctgttccagctgctataaaattacaagaaatttagaaggcccggcacggtggctcacgcctgtaatcccagcactttgggagattgaaccaggaggactgcttgaagccaagagttggagaccagcctaggcaacaaagcaagatgccatgtctacaaaaaatgtttgaaaaattagccagatgtggtgatatgcaccaggagcatggtatgcaccagcttacttaggaagctgaggagggaggattgcttgagtccaggagtttggaggctgcagtgagctatgataacaccactgcactccagcctgggtgacagagagagatatctgtaaaaaatagtaagtaaataaataaataaaatttagaaaatatttctaacaagcattactatgaaagaagatttggtgctggaatagatgtgttcattcaaattaattttattgagtgtctaatatgttcagtacgcctaggaagaatactaggcactggggatgcagcaagaaatcaaacaaatcaaaacccctaaccgaatagagttttaattctagtggataagactcttgtataattgtttctcaagtgtcagatacatagatttctttgtaccccatgcttttccttttaatttgcattcatctgagcacctttgtgagtctaaactaagccatttgtaaatcaatccatgtgtccttcttctgttagcccacaggtcaagacttcaattctttccacagtcacccagcagtacccagctcactacttagagcccttagcactcacaggcaatcagaacctcgaacaatatgctgcgcaggctccatgacaaaagaaaaagagagctcatgttccaccaagttggatctaggactaggaaatctagaggccatctggatcaagtgaggaaaccctgtggagaaaccagtctccagcaaaatgggaaatttacattactaccccttcttattctttttttttttttttttttttttttgagacagggtctcagtctgtctctcaggcttaagtgcagtgggcgcaatcatgatcactgcagcctcaacctcccaggttcaggcaatcctctgaccttagccccccaagtagctgggactacacatgtgtgtcgacacccccggccccttcttattcttttaacctcctcagcagggctctcgttgaagtgacagatgtccatctatgcctttgcatagctgtctctgctttggaattgcccctagttttgttcttaggctctgatgaggactctgggtgagaacgttggccttgttttttcaggtccatggatctctcagcttgaagtcaaggtctcactttcttcttacagacctgccccttcccctttccagctggcaaagaagcaggctgctmctgccaggtttcagaaaccatggtcatttgatggtgcaagaagtcagactgtttttctacaagcggcagaaagctctggggatcctgcctagggggagctcggccaaaacattgggttaggagggggtgggaggggtaatccgtttgatccaacgtcagatcccaccactgactcccttgaacaagggctatcaaatgaggccttctcccagcaagctgtatgaaattggagattccacttaccttctgcctcttaaaattagacaagccctccacacagcaagagaataagtggcaagcatgtggacagctctttctgagctggatgatttagtgaagcagctgtgggggacacaggaggggagatttggaagaaggacgcagtgggctgagggaggactattcaccccctatttgcaatgctggtaagagcaatattggttgggaggtggagagaggagagcttgctgtttgagctctttgccatggagtcagtggggagcctttgaagacaggttcccccaccccatttcccacttggggcctggggagggacttaggttaatacaacgatctgggaacagtcaaaatccagttgctgtttggctctgcacttccagggaaatgtgagctgtctgtttctcattactttgcccttatcacatcaggctgttcttgtggggaagcagtttcatttccaagaaacctgttttgcttctcctcccttgaagtcctccaggctcttgcctcctccctcttccctgcccctccctcatcatctcaccccttactccatc[450 bp omitted]gctgcttcttcctcaagcatccctcagtgagacctcrgggagccccaagtgcctctctccaagttcctatgacatgcatttgcctttattcttacttccttctttctgtctccctcacattttatctacccctgtctttcttctgtcatccccatcttgtacaaaaaaaaatgaaagaatgaataagacctactatttgatagcacaatagggtgactataatcaataataacaattgtaccttttaaaataacttaaagagtgtaactggattgtttgtaactcaaaggataaatgcttgaggggactgactatagtcaataacaacaattgtactttttaaaataacttaaagagttaattggattgtttgtaactcaaaggataaatacttgaggggatggataccccattctccatgatgtgattttttcgcattgcatgcctctatcaaaacatctcatgtaccctataaatatatacacctactatgtatccacaaattttttttaatgaaaatatcttccctatcttttcctagagtttcactcatgactgtcattgaagggtttactgagtcccgcatcacccagggtccactgagatctccctgctcttcagctttggggaagatggcctcaattccactcaygcttaagccctgccctgwgaaaatccaaagtcttcctcaagttgtctgtgaattcctcaagaggtagatccttttggtctactctgactctcaactaccgcttccactgagctaaccaaccgtgtaggttattgattctgtgcctgctatgctatttctttctgtgccagaatcaccaaggataagaacctgacacttccctcagtttaaaaaacaattctcaccaggcccttgtatgtgagtagatgaagaggttcacattagagaatctcacacatcttccaattgcgtatagatatccctttttgtgaaatggtccaaccacacttgcagatttttcatagactccatgaccccaggagccctagcctcacccccttctctgcccgctcttcctccttccatctctcttcttcaccagctttgtggaaaagcctttgtaatgacaaaagggccatccattttaatgggtctatcttccttacaaggctgttgtaaattttaatttttttaattgtgaattgacaaattatggttgtatacatttattgggtacaattttactttaaatttttttttagacagtttcactttttctttttttttcttttttttttttagacagaatctcactctgtcacccaggctggagtgcagtggtatgatcccggctcactgcaacctccacctcctgggttcaagcaattctcctgactcagcctcccaagtagctgggatcacaggcatgcaccaccacgcatggctaattttgtatttttagtagacatggggtttcaccatgttggccatgctggtctcaaactcctgacctctggtaatctgcccacctcagcttcccaaagtgctgggattacaggtgtgagccacagcgcctggccttttttactttaatttttgattataaaatatttcaggcatttagaaaagtgcactggtatattttaagakttgacacatttwaataagatataatggatgataaaatgttgctatttttatttcatgtctctctctcttccccacccccactacccctcctcctccaaaataaaatgcttttcatacagctaaagcctggagccatccctttccttccctcccactccctttaggattaaccagtatccaaaagttgttgcattattctcatgcatatttttgtacttccattatatatgaatgtttccataaacaacatacagtattgtttggggtatttttaaatatttgcttaaatggtatatcgtagtggatgctgagaatgagctttatgaacaagaacaacattatcttattctggtttctatttcttccaatctcagccttgaccccagtggcccagcatcttctaggtacccaatacataccttctaaataaattgcattacaaaatagcctccaaaccatcaataataataataaagcatgccaagttaagaagtgacccaagataggtggtcatttatacactttttaatttttggcctaagaaatttcaataactatgagtaactgttccaacgtaggtacattcttcctgagattaagcgggggctttataaatgcctcactaaggagccttctatcaccaaggtgcaatgtgtctccctttacatgaccctaattcaatgagatcccccgagactgaagttcttagcccatatcctcctattccccaaactgctgmcttcatggatgagtacagcccctcctcttctcctacccagagttcatcccctcaaatgccaagaagactacttgatgttactatctctggatagcagtcaaggacacccgcagtcattcagtaatgggtagggctcacatccctacggcattatttattcatccagactgtgaagaagcagaatccttcagattcttggctgcaactccctgtgagacagaaacctcacccaaggcaatggtgctggcagctgctctaacctctcattactctgaccttcagtagggaaaccatataattcatcttctaaactcttacaacttgggagtaaagatggtgccattaataattatgccaggctaatagacataaataaagaccccttttggcaaaccaggttgtatgatcaccctaaatcagcaatcctgtgtaaagccaagcacagtatcccttcttataaggtgcttcaagtgatatactatccagagcctcaggaaataatcccctcagtccctcttccaggatatgtctaatgatggatgagtccgttctcttacagcagcatgtgaagacctaatcttaatattgttaagtttggggagaagagacagctttttcgcagagagtaattaaactcattttccatttctttttttttttttctccactaggatgaaattagagcctactattccctcctagttctctgaaagtttgcagagaaatgacaacgtatgtcagacatgtataaatcagaggagaaaaaaaataagaccagtggatcaaaactgtggctctaaagcagagtttatttggcatcaacagtaatgtttactgggtgaccatatggtttcatgaataagaattttagcattagataaatttgtgtttgagtttcagtttcaccagtatcttcataaggccctagacaagttacttctctaaataactagactgcaagagtggtgttattcccacccccattttacagataaattgataactcattttacagatagatctatctgtaaaatgagggtggggataatatcaatctcacagtctagttagaaatttttcagtgagataataaattcaaagccccaaggacagtgcctggcacattttaggtgcctggcaaatatgagctataattattactcatactatttaaatctgcattgtatttttttcagcattttctctacttccacacatactctttctgtcccatcaaactggccatttaacttttccaaaaactgccttgtgtttgccacctcttcatttttgttgctggcctgcctctcacctggaacactcgcctctttcctctctattcttattcttttggtgcagtatagccccatcttaccccttttycacagcctacttcaactgccacatcctccaggcagccttctgaaaggtgaattctccatccctgaattcattgttttcttatcactttccaccatgcattataggagattagtactttcccagtacactgtgaatttgtcaagggtatatactatgtctgattaagatttctcttccccatggtgtttatcatattaccttgaaaaatgtgctcaaaggatatctcttgaccatagtagagcttagaacatagtggttaacagctggagtcagacagacctgagtctcaatcataacttctttttttttttttttttttttttttttgaaacagagtttcgccctgttgtccaggctggaatgcaatggcaagatctcggctcactgcaacttctgcttcccggtttcaagcgattctcctgcctcagcctcctgagtacctgaaattacaggcatgcaccatcacatcaggctaattttttgtatctttagtagaggcagggtttcaccatgttggccaggctggtctcaaactcctgacctcgtgatccgccctcctcagcgtcccaaagtgctggaattacaggcgggagtcaccacgcctggccaatcataacttctaattgcataatgtaaagcaaatatttaacctcttcaaatcttgatgctcccctctacaaaatgggcacacggctgcacaggtagagttgagacccttggtttacacttgagcaactagtgaacattcaggagatcagagccttctgctgcatttgttagtttagtcactgttatcatgaagtttcattatcgtcagtaataccctttcagaatgatgcatacctattcccaaagtgtttttagatcttttattttgttgttgaagtcagttgcagtaaatgccagagacttgcataacaaagagctctcctacatctttcactcagggccaaatctgacatctcacaagctctcactgcatctcacaagttgcaacaactgcagaattcatgtgttttcatgtttttcacaatgagcactatgaccattaatctcacaaattgtgtcagctcttaaactcaagaacacatagagattttctcttatctgtcacaatacatacaaaaactgaatcctgatyttggccattcacaaatatctcccttctggatccacattatgaatcatttcttttgtgaccgattggttcatttcttcgcccctgactgctggttcccatgcataactcactcattcctacctctgagctgtttaacaggccatccatccacctttaccactcaaatttaacagtgtgctgtagtgcttgaggatgggctctagagcttaacagaaccagattccactcctggctgcatcgttgaytggatggaaatgttggacaatgcacttaccctttctgagctttaattttctcatctgtcaaatgtaactggataagagtgacttcagacttcacgtgacgccggtgctgggcgaacakggcggcggccactggaccctcgttttggctggrgaaggaaaccctgaaggtgccactggcgctctttgccttgaaccggcagcgccggtgtgagcggctgcggaagaaccctgctgtgcaggccggctcagtagtrgtcctgcaggsctaagaggagactcagcgctactgcacctacaccggggtcctcttccgccaggagtccttctttcactgcgcattcggtgtcaccgagccaggctgctacggcttcatcgacgctgacactgkgaagtcggccctgtttgtgcccaggcttcctgccagccatgccacctggatgggaaagatccattccaaggagcacttcaaggagaagtatgccgtggacgacgtccaggacgcagatgagattgccattgtcctgacgtcacagaagccctctgtcctcctcactttgcgtggcgtcaacacagacagcagcagcgtctgcagggaggcttccttcgagggcatcagcaagttcaaagtcaacaacaccattcttcacccagagatcgtttagwgccgagtgtttaagacggacatagagctggaggttctgcactacaccaataaaatctccagtgagacccactgtgaggtaataatgaagactgtaaaagtgggaatgaaagaatatgagttggaaaggaaatttcaatatccaaaataatagaaagtataatgaaccctaagtccccatcaggtttttgtgttttgttttgtttgctagagcattttattattattattattattattattattgtactttaagttttagggtacatgtgcacaatgtgcaggtttgttacatatgtatacatgtgccatgttggtgtgctgcacccattaactcgtcatttagcattaggtatgtcttctaatgctatccctccccccttcccccaccccacaacagtccctggtgtgtggtgttccccttcctgtgtccatatgttcacattgttcaattcccacctatgagtgagaacatgcggtgtttggttttttgtccttgcaacagtttgctaagaatgatggtttccagcttcatccatgttcctacaaaggacatgaactcatcatttttatggctgcatcgtattccatggtgtatatgtgccacattttcttaatctagtctatcattgttggacatttgggktggttccaagtctttgctattgtgaatagtgctgcaataaacatacgtgtgcatgtgtctttacagcagcatgatttataatcctttgagtatatacccagtaatgggatggctgggtcaaatggtatttctagttctagatccctgaggaatcgccacaccaacttccacaattgttaaactagtttacagtcccaccaacagtgtaaaagtgttcctatttctccacatcctctccagcacctgttgtttcctgactttttaatgatcaccattctaactggtgtgagatggtatctcattgtggttttgatttgcatttctctgatggccagtgatggtgagcattttttcatgtcttgtttggctgcataaatgtcttcttttgagaagtgtctgttcatatcctttgcccactttttgatggggttgtttgtttttttcttgtaaatttgttggagttcattgtagattctggatattagccctttgtcagatgagtaggttgcaaaaattttctcccattctgtaggttgcctgttcactctggtggtggtttcttttgctgtgcagaagctctttagcttaattagatcccatttgtcaattttggcttttgttgccattgcttttggtgttttagacatgaagtccttgcccatgcctatgtcctgaatggtattgcctaggttttcttctagggtttttatggttttaggtctaacatgtaagtctttaatccatcttgaactaatttttgtataacatgtaaggaagggctacagtttcagctttctacatatggctagccagttttcctagcaccatttattaaatagggaatcctttccccattgcttgtttttctcaggtttgtcaaagataagatagttgtagatatgcggcattatttctgagggctctgttctgttccattgatctatatctctgttttggtaccagtaccatgctgttttggttactgtagccttgtagtatagtttgaagtcaggtagcatgatgcctccagctttgttcttttggcttaggattgacttggtgatgygggctcttttttggttccatatgaactttaaagtagttttttccaattctgtaaagcaagtcattggtagcttgatggggatggcattgaatctgtaaattaccttgggcagtatggccattttcacaatattgattcttcctacccatgagcatggaatgttcttccatttgtttgtatcctcttttatttccttgagcagtggtttgtagttctccttgaagaggtccttcacatcccttgtaagttggattcctaggtattttattctctttgaagcaattgtgaatgggagttcactcatgatttggctctctgtttgagagtcaagacccatcagtgtgctgtattcaggaaacccatctcatgtgcagagacacacataggctcaaaataaagggatggaggaagatctaccaagcaaatggaaaacaaaaaaaggcgggggttgcaatcctagtcttggataaaacagactttaaaccaacaaagatcaaaagagacaaagaaggccattacatagtggtaaagggatcaattcaacgagaagaacyaactatcctaaatatataggcacccaatacaggagcacccagattcataaagcaagtccttggtgacctacaaagagacttagactcccacacaataataatgggagactttaacacccaactgtcaacattagacagatcaacaagacagaaagttaacaaggatatccaggaattgaactcagctctgccccaagaggacctaatagacatctacagaactctccaccccaaatcaacagaatatacatttttttcagcaccacaccaccacctgttccaaaattgaccacatagttggaagtaaagccctcctcagcaaatgtaaaagaacagaaattataacaaactgtctctcagaccacagtgcaatcaaactagaactcaggattcagaaactcactcaaggctgggcgcggtggctcacgcctgtaatcccagcactttgrgaggccaaggtgggcagatcacgaggtcaggagattgagaccatcctggctaacatggtgaaaccctgtctctactaaaaatacaaaaaattagccgggcatagtggcgggcacctgtactcccagcaactcgggaggctgaggcaggagaatggcgtgaacccaggaggcagagcttgcagtgagctgagattgtgccactgcactccagcctgggcgacagagccagactccatctcaaaaaaaaaaaaaaagaaaaaaaaagaaactcactcaaaaccgctcaactacatggaaactgaacaacctgctcctgaatgactacagggtacataacgaaatgaaggcagaaataaagatgttctttgaaaccaacgagaacaaagacacaacataccagaatctctgggacacattcaaagcagtgtgtagagggaaatttatagcactaaatgcccacaagagaaagcaggaaagatctaaaattgacaccctaacatcacaattaaaagaactagagaagcaagagcaaacacattcaaaagctagtagaaggcaagaaataactaagatcagagcagaactgaagggaatagaggcacaaaaaaaccttcaaaaaatcgatgaatccaggagctggttttttaaaagatcaacaaaattgatagaccgctacaaagactaataaagaagaaaagagagaagaatcaaatagacacaataaaaaatgacaaaggggatatcaccaccgatcccacagaaatgcaaactaccatcagagaatactataaacacctctacrcaaataaactagaaaatctagaagaaatggataaagtccttgacacatacactctcccaagactaaaccaggaagaagttgaatctctgaatagaccaataacaggctctgaaattgaggcaataattaatagcttaccaaccaaaaaaagtccaggacccgatggattcatagccaaattctaccagaggtacaaggaggagctggtaccattccttctgaaactattccaatcaatagaaaaagagggaatcctccctaactcatttgatgaggccagcatcatcctgataccaaakcckggcagagacasaacaaaaaaagagaattttagaccaatatcgttgatgaacattgacgcaaaaatcctcagtaaaatactagcaaaccgaatccagaaacacatcaaaaagcttatccaccatggtcaagtgggcttcatccctgggatgcaaggctggttcaacatacgaaaatcaataaacgtaacccagcatataaacagaaccaaagacaaaaaccacatgattatctcaatagatgcagaaaaggcctttgacaaaatacaacaaccttcatgctaaaaactctcaatcaattaggtattgatgggacgtatctcaaaataataagagctatctatgacaaacccacagccaatatcatactgaatggacaaaaactggaagcattccgtttgaaaactggcacaagacagggatgccctctcttaccactcctattcaacatagtgttggaagttctgaccagggcaatcaggcaggagaaggaaataaagggcattcaattaggaaaagaggaagtcaaattgtccctgttttgcagatgacatgattgtatatctagaaaaccccatcgtctcagcccaaaatctccttaagctgataagcaacttcagcaaagtctcagtatacaaaatcaatgtacaaaaatcacaagcattcttatacaccaataacagacaaaccgagaatttgctagagcrttttaaagtcaaatcccagatatcatgtcattgtacctgtaaatacctcagtagatatttcagttgaagagaactatttttacttttacataaccaccatgtcaatatcacatccatcatcacaaatgaatcgtaactccttaatgtcatgcatatctagtccatattgatcctaacctctttttagcattggtttgttcaagtcaggatccacacagagtccatacattgcacttggctgcgactagaagcagcatgtcgtgaagctgagctctggggagatctcacccctgtctacaaattgctcgaccttccctccacccccatcccaagaccctggattggccttgctgccgcctcctgtgtggaccagggtggctcttggagagatgagatagaagccagaggccacagcccagtgcaccaggaagctctcagccaggggcagccacccacacgagtgtgctaggaagctttcagccaggagcagccacccgcagggtgctgagtggcactgggtcagtgtgtgtgcctgctgtgctcatgctgtgcacctgccgtgcatgcccacctgtggctgcccacaggacatacagaggggagacagtgcccgccggggaagccatctgatctgtgggcccctgagagcttagagcaggggggtggggatgaggactgagatagcaagaacgagagatggaatctgttcctgaagggaccgagtggggagagaggggtcacgccctctgaagatggtgggaagatgggtgtctagggaaagtgtcacatcatagggtatccctggccagatttgaggagggtgcccccgattgccggtgcccatgctgacacccctggggacatctgcagccagagagatggactaacacttcttcctcctggagctccctctccagggcgggatcactctgtgttgcagttttgtgatccttgtcctggagagcctggaggcgccttcttggggaccacgtctcatttatctgggcggtgtcagacccaccgtgggtgtcaggaaacatgtgtgtggttgggtgcgatagatggatggaaaagagaataaaaggttttaagctatttttctgccatcttttgtgtcactgggaactcgagaattcttaactagtcagggaataaaaatctcttctaaagccagaaaaaaaaaagcgacttctgataatctggcaagcttagctaatgtggaaaggctgtccttccatatgataaacatagaaacactggagaaaatataacaaaaagaaaaaattaaatatgtaaccaaactattcaataataataaaaggagccaggtgcggtggctcacatctgtaatcctagcactttgggaggctgaggcagacagatggcttgaaactattagtttgagaccagcctgctcaacatggtcagatcccatctctacaaaaaatacaaaaaataaaataaaattagccaagtatggtggtatgtgcgtgtagtcccaactacttgagaggcagaggtgggaggatcacctcagcctggggaggtcaaggttgcagtgagccatgatcacaccactgcactccagcctgggcaacagagtgagaccttgtctcaaaaataataataataacaataataaaagaaaattctcaggtccaggaatagagcaggaaatcaaaggcagggtgaggaacagcagacaaagccaaagaactcccagaaggatcagaaactggcaaaaaccgtagggacaagaggcattcctgtacttcaggttcctgcaagacaaggtgctgaacttgaatccctactaaaagctagtgatgaaaaatgccatcacaccataaaattggacttgaaatactcttctattggcctggatacatggtaacaaagctacccatcaggtgtcatggctaaaagtttagactcataagaaatcgttggccttaaattgacacaatccaattgatgggacacttgaagccaagaaattatcacaaaaacagatccagaattggtaaaaatccactgagctttagaagaaacaaactcagatcatcctataaagaagaagatatatctcaagtcatgcagactcaactttcactaagaatgagtttactacggaaaataattttgaaccacatgagttaagccacataaaagaaagtcagaagatgcaataaatagtaggaattcgcaatagaaaatggcaaataaaacagtataaaaatgttaaataaatgtttttatatttaaagagagaaggagcataaacacaatgcattattaaaatattttaaataatcgttttaatttttttaagaattaaaaacattttttaaccaaatagaaatcttgataatgaacacatagtcactgaaataagtacatacaaaccttcatatttaatggttgggccaaaagcagattattcatagctgaggaaataattaatgaattagaaaacggagctgatgaagatgttggaatgcatcatatgtggcaacagaatggaaaatacaaaagttaaggcctggcctggtggctcatgcctataatcctatcactttgggaggccaaggcaggaggattgcttgagtttaggaggttgagaccaacctgagcaacgtaacaagatcccatctctacaacacaattttaaaacttagctgggcatgatgacaagtacctatagtcccagctactcaggaggctgagtggggaggatctgttgagcctgggatactgaggttgcagtgagttgtgatcatgccactacactccaacctggatgatggagcaagaccttgtctaaaaaaaagaaagaaagaaagaaaaaaaagaaaaaacagaaaaaaagagttaagagaactgaagtggagagagagacgggcccacatgggtctaaaaaaaaattgtaggagaacacagaaagtgaggggaaaagcaatattgaaatagaaatcgaataataactttttcagaacttaagaatgacttaaattctcacatcaaaagatcattcctagcaatgaaaagaacaacaaaattctcctacatatactgtagggaagtaacaaaataggaaatgcaaagagaaaatatccatatcacctagagaaaagagattactcacaaaagaatgaccattacatcgaaaagtctctccattcattataatagatgccagaaaacaatggaacgatttctgcaaagagctaaggaaaaatatttgtccatctatattcccacactcaactaaattctcatgaaaaaaaatgagggcaaagtaaatatatcttcaggcaaaaaaaaaaaaaaactgagtttctaagtcctcacttaaactgcttctaaagaatatagttcagctaaaagaacccaaaacccagatgtaaagaggtggattaaagaagcaaggaaaagaaaagaaattggcaaacttgtgagtaaagttaatgtattgatatttaaaaaataatattgaccagtgttggtggaggtgattaaaaacagttcaaactaaggaaccaaaacttggaaatagagatggaatgaagctaagaatcttttatcgtttaaaaagagattaaagatattgatttattttagactttggactgtatatatgttaaagtgtaaaggcaactactaaaagaatagaaatagaatgtagaacttctacagagaagcaaaataggaaataagtaaaatgcaattaatcatatagatggcagaaatggaggaagaaaaaaaggggaggggagaaggcaaaaaatagaaaacacaaagtaaaatgattttttaaagcagcataaatataccccaataaatgtaaataaacgtaactttcctctgaaaagacaaactattagattgttctgctttctatcccaatagattttgtttacaaaggacaggcctgaaagtaaggacacagaaagatttaaaatgaacggattaaaacattttatatcacataaatgttagtccaaaggttttcttcacggcattaacaggctagttctaaaattcacatagaagaataagggaacaagaagaaacatgaatattgggaagaagataaacaaggagtaggatttgcctgactaagcatcaagacttcttttaaatcacaataactagaacactgtcatattggcatggcaatagacaaatgaaccaatatccaaactacacacatatggagatttagcagtgttacaaatcagtgggaaaaggaaagactagtcagtcaatggtgtgggacacttggctatccatttggaagttaataaaagtggatacatccttgtgtcaagccatatacaaaaaaaagtgaattccatatgaatttaaaacattaatctgaaaagcaaactttttaaacatttagaaaagattctaaattaggggaaatatctttgtgacattgggagaggaagacataaaaaaccaaaacccataaagaaaaactttttgaatagaatatgcctaaaaatattaaacaaaaggtttgatatatttgactacatgacaaaaagaaaatgttagaatgacaaaataaaacataaagttaacacttcacaaatttgcatatcatccttgcacagacaggggccatgctaatcttctctgtatcgttccaattttagtgtatgtgctgcaaaagtgagcacaaaacataaagttaacacatgagtgagagaccagaaaagatgtttgcaatgtgtatgacaaataataggttagtatccaaaatatgtaaataaccatgacgtttgtttgagtgcagagtctcaattcacagggaaggaatatgaagctgtctacctaatacccaataagggagcagttggtaaggcgtataagaagcatgcaaaactgatgatggagtatctcgccaattgtgatgaatgttacattacagaaattgagatgcaattgaatgagaaaggggaatttacaattgaacccgaagggaaaacatttcggctaacaaaagatgtggccaaacgtgatgagattccagagaacactctgtgtggaagaagttgttctgaatgtaactgaaccctccttcagcctgtgcaggattatgtatatggtatttgaacatatattccatgtaagagaaggagatgaacagagaacattcctcagtttccctgctatagtcactctattcaaatgttacgccctctcactgagccaaaaccattcatgccatttatcaaggaattatcggaagccctgaccaggcacaggttgtctcacaaagtagatgattcctctgggtcaattgggagacactatgccaggactgatgagattggtgtgtctttcagtgtcaccattgactttaacacaatgaacaagaccccccacaatgcaactctgagagactgagatgcaatgtgacagataacagcagaggtctctgagctgcctagcatagtccgagatctgaccagtggcagcatcatatgggccaatgtggtggccaggtatcctctctttgcagagcaatgatacaggaggtagaaagaaattatttaggcagatttagttagaaagaaattatttaggcagatagtgagggcaaacgagtccttagcagagcttcccttcaaacaaaaagcagcccaaaaaatcatttctttcccaacaaagagcagcctgaaaaatcaagctgcaaatatagrtaagcaagctggaagcttgcacaggggaatgccagcagctgtaccaatargaaagggctacctgggggctaggcgtgtgcaccatggaagctccatcttcccttttttgttagcacrtgtacagtaagaaaaaaatgggcaacatggcacagctcargcagggaacccacttgcataatagaagattggcatgggggcggccagagatttgtgccataggcaaatggcacacctggtcctaaccagatttttgcaccctatgtaaatcagacaccacctccccacyagctcatctataaaaacccctgcattttgctgtggaccagcaacctattttttcaggactactctgtgtagcagagagctattctttttcttttcccaattaaatttccgctcttaacctcactcattgtgtgtccgcatccttgatctccatggctgtgagacaacaaacctcaagtattttcccagacaatgaggccacttcaacaagagactggtaaaaaaaagagacaatcaaggaataaggacaatttttggcgacgtgcattaattgaataaataacacatcatatccactttataaaagagaacagcattgtgattactcccagtaactgtattctatcttcagtggctgtctgattttatccccacaatcaaaattgaaggaattctgaaaagaaaaaaatcttaaccttgggggttaagatttcaacataggaatttggagggggacaaaaatgttctatctgtagcagggtctaaaagcacaattgcccacttaatctctaattcatagagtaatattaatatttaatatacagtttacttgttaaatgcagttccaagcactttacatgtttggatggtggcactcttgtgtactggattatttccttcggctcatacaaacacctcctagtatctctcattaaaaacaaaaccacaccccttttgaactctcataaccctccagatgcttctccatttctctgtactttttcattgtttagggttgtctacaaacattatgtccacttattcattttccacttactcttactcactacaagctgagtttcacctccactactacacagcaattactcttgtctgtgtcacctgtaatctccatgttaccaaatcctatgagcacatttctgccctcgtttcagttgattccatagtagcattccacatagtcaatcactcctaccattttggaactccctcctatattggcttttrtgacactcttcagtcttggttttcattatataccattgcctactccttgcctgtctcctttactcctcttctacccaatctttaaatgttggcacttctcaaaccccagtggcagcactccttctttttctatactcgttctcctgatataacccagtcgttctcaacagggtgtgattttgccccctagaggacatttgccaatgactagagacatgttttactgtgacaactgggagtatgtyactggcatctaaaggacagaggctggaaatactactaaacattgatggtgagtatacaatcctaaaatgcacagcacagcctcccacaactaagaattatctgttccaaagtgctgctggtacattgagaaaccctgcccatgcaggctttgcctttttactgtctgtggcagacagtatgtcttgtcttctggtatccattctccccttctttttagtaatggaattgacatttcatcaggtagcatatggccatccagtttatagactctatgttacagcctctcttgcagctaaataacatgtgttacccctgggtcgtttccttaaaaagaaggtgcacctttttccctatttctgaatgataggatgtggtcttggtgctaatgaaccaatttccaccatacagagaaaaataatattcaagggatgacaaataaaagtgccgtgaatccctgaatgaccttgtggagtggagctgtctaactagatcacccacctatctctgaactatgacatgaatgataaagaaacttgtgccttgtttgatccactatatttgggtgcctcattttaaaaatcttaattgatctcccactgacataccatctatataatacctgatggagctataatttgtaatcactaccttgagttcctctctaaacttcagatttataaattaactacctacttgatatgtattcttgcatatctcccagaatctcaaacttaacrttttcaaaatgaagctattgatttcaccaccaaaccacccctctttggcctttcctccactcaataaatggctagaaattgtaagtcatccttcatcaccgtctttcaaccccaaatatatgccttcatttttgcttccgaaataagcatgatatatgctcattttcttatagctatttctaccatcttggttcacgccactaccatctctctcctggaccattgtgatagcctctgcactgggcttcctgtattttgctttgctcctccgattcattttccacagagaagctggaggaaatctttctaaaataacaatcagataatcacatgcttttcacaagacttttcaaagtctacctaatgcgcttaaaatagaactcataattcttacccagagtctacaaagatcagcataatctaatccttgtatagcttcatcttgggccactcttgccttttacacctgatgcccaagccacactggtctcctttcagttcatcacacaaagctctttcctgcctcaggaccttcactcatactgttccttctgtcttaagtgcattgatccctcctttctgcatggttgacccacctccttctgcaatttcctatcttcacagatgcctccagggccaagccaaataagcttcttccctctccccttgttattctctgttaatgtgccctgtttatttcctttatgaaacttatcaccatttcttattatatacatatacgtatgtgtgtgttttgtctgcctctcccacaaatacatggattctggttgttttattcaccaatatgtatttggtattaacattgccaggcacacagtaggtactcaagattgtgtgtgtatgactgtgtgtagtcagttgttcatttgtatttattgaatgaaataatgtttcagcaaagcatggtttaccctggatttcaccccataaattctatccagttgaaagcagggtacaatgaacattaagggcaacctgaaaggggaaaggagttgcactcagatgacatgaaacttaatgagagatgattacacacagcagtgggttgtgtgggagggaagaacatgatgctgacttggtaacatagatctctgctcaaatcatcattcacttccagtaagaggaaaatgtaaaacaggtccaactcttagaggctaattgtttaagatagaagttaggaagaaaaagaaagaaggaaggacaggaatgggaaaagaagaaaagagaagagaaagcacagaatgttcttaatggttttattctcattcaagagcaatgtataaccagggaagagggaaatctgatgaaatacttggaaaacttcattgctggaactaaagtgatctgtactggtctttgagaaaggtcttattgaatagttggctgccagtctcagcagtccctgatgataaacactgtctgtgtataaattattcatgtcttcttttttttttttttttttttttggagacagggtggtgccctgtctctgctgcccaagctggagtgcagtggtgcgatcatggctcagtgaagccttgacctcccaggctcaggcaaccatcccacctcaggctcccaaatagctgggactataggtgcatgccacctctcctggttaattttttaaattatttgtagagacaggatcttactatgcttcttaggctggtctcaaatacctgggctcaagcaatcctcctgccttagtctcccaaagtgctggaattacaggcgtgagccgccacatctggcctcatgtctttttttcagaaagaactggtcatagcactttcttctcctttttctgacactgcctctagaagatccatcctactcacagtctcaccacccacacacacccacccattgtgcaggacttctccaacctgtggctggtttcacaacttgccaacactgatctgagatgccagtgttggctgtgtttttctggttttcttctgaagggcaacagcaccttgagaatgagtaccatcagaaactagcattattcccaggtctgttatgtacaaggtgttttactaaagtaagycagtcaatcccttagaaaatccaataagaaatgtattgctctccccactttacacakgtggaaagtaagactcagagaagttatgtgctttttgtcagtcacacagctagtgagaatctgtgtctgctctgtttgatccccagcacatgatctcttctctgcatatggtacctctcagctacaaggcagaagtttttagacaaataaaactacctcactacagccagagcgatctttttaaaaatgtagacctaatcatatccctctccagctaaaaatacttcctaaaatagttccttactaactagagcttacgccgctccctctcctggaaatactaacccttcagcattaaatccacacccaaacccacatgcacaystgtgtgcactcacacacacacacactcacatcattcagtttcatttaaataactacagtcatgtgtcgcttaacgacagggatacattctgagaaatgcatcattaggggatttcactgttgtgcaaacagcatagattgaacttacacaaacctagatggcatagcctcctacacacctagaccatatcgtatagtctattgctcctaygctacaaacctgtaccaaatactgtaggcaaatgtaacacaatagtatttgtgtatctaaacataggaaaggtacagtaaaaatacgatatcataatcttacaggaccactatatacgctgttgatcgttggccaaaaggtcattactcagcttatgactaaatttcctttcaacctttactataccctaaaccagtggttcaccaaccacagagtcrgcacaaattatcygggaatattgctmaaatttttaattttcaggycycaccctcagaaattcagtatccataaatctgaggaaggggtcaaaaatctgtatgttaaacaaccacttgaaatgaaagaaaataaagtccttattctcacggagcttacgatttccctggagtaaaaccaaaaaataaactgatggacatatggtatatcaggtggcaaagaataataaataatgtaaaaaagtactgatagggagctatcgtattatttatttatttttwwttttttttttttttgagacggagcctcactctgtcgcccaagctggagtgcagtggtgcgatctcggctaactacaacctccacctcccgtgttctagcaattctcctgcctcagcctcctgagtagctgggactctaagtacatgccaccatgcctggctaattttttgtatttttagtagagatggggtttcaccatgttggtcaggctggtctcgaactcctgacctcgtgatgcrcccacctcagcctcccaaagtactgggattacaggcatgagccactgcacccggcccgtattatttatttaaatttttctttttaaaggaaagggttttatctatcttcttcaccgtttcatcccaagtatcagggatctagcactcatcaaacatctgttgaggtaggaatgggactactttacacatgctagaaataaggatcctcataatagcttttgtaaagttaggaatgatgacatgatgcctaatgctgccacctaaagcagcctatgtaagcattccgaagtagaagtcagtggttcagagccaaggaacttaaattgtgttttgttttgttttgttttgttttgtttygttttgttttgttttgtttttgagacagcgtctcgctctgttgcccaggctggagtgtagtggcacaatctcagctcactgaaacctctgcctcccaggttaaaacaattmtcctgcctcagcctcccgagtagctgggcttacaagcacacatcaccatgcctggctaatttttgtatttttagtagagatggggttttgccatgttggccagtctggtctcaaactcctggcctcaaagtcatctacccgtctcagcctcccaaagtgctgggattacaggtatgagcccgggccaccacgcatggcctggaacttaaattttatcacaaaaatagaacaacaggagttttacatataaccaagatggagtaacaggtgattggatttactctttcactaaacaaccaaaaaaaacaaacatgtaacagtggttttcaagcagtagacatcaggcactataggrcagagatacttgaaactcagagaaacaaacaaggtaatcactgttgccctagtttactgcccgaacagatacttctgtccaggcaacactgcaggggtgtagcacccacgcagagcccagctgtcaccctgaattgaggagagagagctcggygtctgagaaggcaaaggtggctagaatttgcaagacaggtccctggagagaaattatgcrcgcagagaaaaagattgagctccagaaatattcaaaaggtccccctcaaatgttcagctgcatattgacaggtgcatgcatgtgagaaaactgtatgagactatggaaggaacatccaaaaaagagcacaagtaaccactgctagggctcacaaatccaagaatagtccatgttctcaccaggcagagtagaacaccttgtaattcatagtccattaggtggagcattcagaaaggcattgcctcagtaaagggaaaatttagttcaggatcaaaggccagtctagtcctaccttaaaatgcttaaaagcaagcctcagaaagatcaaactacttgctaataatgtaactgtgttccaaaaccaggtaaaaatatttactagaatataaaaatataagatacaagatatagaatataaagataaccagcacccaacaattacacaatgtctggtatacaatcaaaaattaccaggcatgcaaagaagcaagaaaaaatggcctatgctaaggacaaaaattaaaccatcattctcagcaaactgtcacaagaacagaaaaccaaacactgcatgttctcactcataagtgggagttgaacaatgagaacacatggacatagggagggaaacatcacacaccggggcctgtcagggggtgggggggctaggggaaggataacattaggagaaatacctaacgtaggtgatgggttgatgggtgcagcaaatcaccatgccacgtgtatacctatgtaacaaaactgcacgttctgcacatgtaccccagagctttaagtataattttaaaaaagaaaaaaaattaatcaatagaaacagacccagaaaagaaaaagataataaaattagtataaaaagacattagaataataattgttaatgatatttaatgtgttcaagatgataggtgtaaaactaatcatgttttgtagatatataaaaaatattttccaaaagacccaaattaatcttctagagatgaaaacaacaatttctgagattaaaaatgtactatatggaattaataacagattacacattgtgaaagaaaataccagtaaactgaagatacaacaatagcaactatccaaaatgaagtacacacacacacaaacacacgcgcgcgcgtgcatgcacggcagacaaaaaataaatagaacattagcaagctgtgggacaacttcaagaggcctaataagatgtaattagaattgctgaaggagaagagagagaggaataaataggaaaaaaatttttgaagcaaaaaagtgtaatttttttccaaatgtaatgaacactataaacccacagatttaaggagctcaatgaatccaaagcacaaaaaaagtaaaccataaaatatcataaacatcaggcttaaaaccagtgatagaaaatctttttttttttttttttttgagacagtctagctctgtcacccaggctggagggcagtggcgggatctcggctcactgcaacctccgcctccctcgttcaagcgattctcctgcctcagcctcctgagtagctgggattacaggtgcctgccgcggtgcccagctaatttttgtattttactagagacgggggtttcactgttttggccaggctggtcttgaactcctgacctcatgatctgcctgcctcggcctcccaaattgctgggattacaagcatgagccaccgcgcctggcggtgataaaaaaaaatcttaaaagcagccagagagaaaaagacatgttatatataaagtaatgtaaataataatagctgactcctgttcagtaacaatgcaagctagaatacagtggaacaacatctttagaataccgaaagaagaaaaccctcacaccttaaaattctaaacctgaaaaagtaccattcacaaaaatgtataataaagactttctcagacttataaaagaggcctgacacagtggctcacacctgtaatcccagcactttgggaggctgaggcaggtggatcaccttaggtcgggagtttgacactagcctggccaacatgaggaaaccttctctctaccaaaaaatacaaaaattagctgggcatggtgttgcacacctgtaatcccagctactcaggaggctgaggcaggagaatcgcttgaaaccaagaggcagaggttgcagtgagccgagatcccatcatcgcactcgagcctgggcaacaagatcaaaactctgtttaaaaaaaaaaaaaaaaaaaaaaaaaaaatatatatatatatatatatatatatatatatatatatatgattaatcaccagaagattggtttaagtcaaaataagaagaatgcagtatgacatatataacttaggtagaagtaatatatgtggcaaaaatagcacaaagataaggcaaggaggaatgaaaatacacttgtaataacccaaaagaaggcacaaaataggaataaaaaaatagatgatacaaatacaaaacaaacagcaagatggcatatttaaactgaagcataacaatcattaatcatcaattactaaatgtaattagtctaaacatctcaaaggtaagagatcatcaaattagaaaaacaaaagaattttatgtgtatacatatgtctaaatttgtcaaattgtacactttatattcttggtttatcatatgtcggttatagcttaataaagattttaaaacaaataatctagtgtttggtagcagaatagggtgattatagtcaacaataatgtattgtatatttcaaaataactaaaatagtagaatcaaaatgttcctaacacaaagaaataataaatgcttgaggtgatggatattccagttaccctgacttgattattacacaytgtatgcttgtatcaaaatatcacatgtagccccrtaaatatgtacaattattatgtatccataataattacaaataactacaaacaatatttttaaatatataaaattatatttaaaatttaaaaataaattaaaaataaaaattaaattaaatagaataacataaaagaaaagtagacaggagaaaagggctgagaataaaaaatgtgatagggaaggtcttcactgagggactcactatcgaaagctgtagaccaaaagtcaatcacatcattcatgaattcaaggtgactgcaaggaatctgttgaagacaaagtaaccacgtgttttccaaattaagccaagtcacaggaagccataaatgttttcaaaggcacttttccaacaagttattcattaaaaggatgttgacagatgattcaagtgtctggttcaaaacctcgcctcaaagaggaatcttttcaagagtctgtcttcctaagaattcatatctaacaggagagctcccgttagatatgaatcactaaattcatcttatttttgacctttagaatgagactaaattaatctgctccctctcccacttgatagcccttcaaatattttagatcatattatcccttctccaggctgtctatggtaaaattaatcattccccatgggacctgcttccagaaattgtcaccatcctaaacacttttatttggatatacttctgctgaaaatctcccttttaaaaatagagtactatattgagaataagcacaaaattctaggtgtggtctgatcttttaaaacttaaattatatacttatacattgcaacctataaatacatttgttttcttaataacattggcaaaatgtgtgtcacatataccstttaaactctcaacttgttttcatgtgaacagctaactatgataggagtcttcatcctatcttctataatcagcattttgaacctcagtgcaatattttatatttggtgagattatatgctttctcatacgtgcaggtttacttcatttcattttagttgtgtttttgttgtttgttttttgttgttgttgttgtttttgagacggagtctcactctgttgccraggctggagtgcagtggcacagtctcggctcactgcaacctccgcctcctgggttcaagtgattctcctgcctcagcctcccaagtagctgggataacaggtgcctgccaccacgcctggctagttttttgtatttttagtagagacggggtttcaccatgttggccaggctggtctcgaactcctgacctcatgatccgcccgcctcagcctcccaaagtgctaggattatactttcaatgtattatctatttctactaattttgcatcttttttttactatgacttgcaagaaataagagaaattagagagaattataatcagaaaagcaagttaagcagccaggtacaatatttctctcaatagctatttgatattacaatgtggagaaaacattagagattagcctgccaaaacaaatcattgaaatcaaaaatataagaactgagtcaagtagtcagcacagtagggtcaagtcctgattcccctaaagaataaatatggtggaagaacatatctatttatctctctttccatcaatcttccaaaagggaagaaaataaaagaactaaatagatataaattaaaattatataaatacacaggaataaaaagaatgatagagatgataatagtatataaaagatgtcagcaaaatattggaacttgaaaagaatgattaagtagtaattggcttaatagatttgatagaaatctaggttacagaagagaaagccaagaagatccaagcaactcatttcaaagaacctcagagaggctcagaatattgtgtcactagctgtctcaaaacttcaagatgaaggatgggatttcaggattatataagaaggagttatactccccaacttcctccaccattcatcaaactggttacctatcccttcttcagtctagcaaaaacaaacaaacaaacaaacaaaaacacacacaggaagtttgtcgtttggagaataaccaatcagctctcttcttccacttggtttctcaacattggtagccaggcttataacacctagtcaggaaattgaagagttcctctatggggaaactgagaggctcaggagttttgagaattcccccaacaaatcagccaggtccattcctagtctctctaaaatgaagtcagcaagccctagcccacccatagagattcaggttttcttggaggagagaagtttaagaaataactcaagaaaaaatgctctggtrctgaaagatagagatttatagattatatggaaccagcccaaatgcccatcaatcaatgagtggataaagaaaatgtgatrtatacacacaccatggaatactactcaaccacaaaaagaaacaaaataatggcatttgcagtaacctggatggaattggagaccattgattctaagtgaactacctcaggaatggaaaaccgaatattgtatgttctcactcagaagtgggagctaagctatgaagatgcaaagacataggaataatacaatggactttggggatttggggagaaagagtggaagagggggtgagggataaaagactatacattgagtacaatgtayactggttgggtgatgggtgcaccgaaatctcagaaattaccactattcatgcaaccaaacaccacttgttccccaaaaacctattgaaatagaaaagagacagaaatctgcagattaaaatattgcactgagtatccagcacaatgaattttttacaaacccacattaacacacatcattgtgaaaattcaaattcaggggaaaaaaaatagtatatataaaatattgtgaataatatcagccttctttacaggaactcttgaagcttaaagacaaagaagtaatgtcttcaagattcggagaaataatcggtttccacatagaattctctacacaagcacatatgcatgtacacacatgctattaatcacataagagggtagaataaaaatgttttcagatatgtgagatactgtctcaagaaatttaatggtcaagcaccccctcttaacaagtgcctggaaaataaaatctacaaaatgagaaagtagcccaagacagaggatccaggaaatagaggatctcacacaggaaggggaagaaattccagtatgaagttagggaagtcgcaggatgttcgctggtcatcaagcctagagacctgtcaagattggcacaagagaatagaaagttccaacagggtgactccataaaaaaaaaaaaaaaaagaactgatagactatctgaaatgttgattgtgctgaaaaaacatattcaactagtggactatagaatgaattagtgacagaaatatgggaaaaagggctaatcaaaaatttaggcaatgattaatgctgggaaaaacaaaaagttgttcaaaagagaaacatgtaattgtgtatttctttgatttaaaatatacattttaattagaaacaaatatattcatcaaggagcagaatctgcccagtgattccattccttttctttcttttaaatgcttgatcattgttttcttattttagatattatttcatccattgatgatggaaaaaaagcatttagctgagcatggtggtgcacgcatgtagtcccagctgcttaggaggctgaggcagaaagatcacgtgagcccaggagttcgaggctgcagcgagctatgattgcaccacggcactccagcctgaatgagagtaagaccctgtctcaaaaaacaaaacaaaacaaaaatttagatccatgtataccaaagtcccttacttggccgggcgcrgtggctcacacctgtaatcccagcactttgggaggccgaggcgggcggatcacgaggtcaggagatcgagaccatcctggccaacatggtgaaacgccgtctctactaaaaatacaaaaacaaaattagccaggcgtgatggcgggcgcctgtagctccagctactcgggaggctgaggcgggagaatggcgtgaacccgggaggcggagcttgcagtgagctgagatcgcgcggctgcactccagcctgggcgaaagagcgagactccgtctcaaaaaaaaaaaaagaaaatcccttatatacacacatacacatacttctgctaaccccatcttcttgatattataatttttggataagtaaaaattcatcattcataatattatgactatgcaaatactgcgacagctgtagctcagggagttgaaaaactgtgtacagaaagtcaatcaataaaataatgtctacgactgaaaaaaaattaatacatttttagcacatttagaaatatggggttaaaattcagaagagtcagctaagagttgaaagtttatgtttctggggaacatgactcaatgttagggagcaggacccctgtagttcttttttttttttttttacaatatgattctgttgttctttgataataattttaattaattttttaattataatcaccaaggatcttacttaaaattataataaaagctcttttttattgtttagaaacttgttcttgaaattaaaaatattaatttgagaatcaatttattctgtagaattgaaaaagcaaattaawgttatatacatttaaaaatcagataaattacaatccaggaattcagaactctaaccccagaccatttggccaaggaaggttggcacattacacttacattttttttttcattttcctgtttatcatcatgcttcatttcccaaattatttgraattcagaatgcatattggaatttagcatctttggatcagtaaaatctctttagtcatatttcctctgttcgttatgaacaatgaaaacagaaagattgaaagagcactgtgcacatataaatctatgagccagtttttaacttctaatctaaagcccagttcttctttgagtctttcttgatggagtggggaaaacaaggataaaaggcatttaagataaagtatttttatagttgcaacacacaaaattataatatggaaatttgtccttatagatatctgaacaatttgtagtgaagaacaaatttactccaaactaaaatgctatttgtttgctgttttttcttctgtaattaagaaaatttaaacctagtcctttgccaaaataatagttagaaawtttttttctttattatctaatcgtctgtgctgctgagtattgctacaggtaagttaaattagccagaaaattatccaaagaatttatactcagggcctgaaaaaatattatactgaataagtaaagtccagatgttggagaaaaaagcaatttaaaaactagtgaaaataggctgggcgcagtggctcatgggcacagtggctcatcccagcactttgggaggccaagacagggtggatcacttgaggccaggaattcgaaaccagcctggccaacatggcaaaactgcctttctacaaaaaatacaaaaattagccaggcgtggtggtgcacacctgtagtcccagctacttgggaggctgaggcagagaatcacttgaacccagaaggcagaggttgcagtgagctgagatggtgccactgcactccagcctgggtgacagagtgagactctgtctcaaacaacaacamcaccaacaaaactagtgaaaatataactacctagcagtactatcatatgttttgtgaatcctagtttttatagtaggacataataaaagactggaatctaggattttagtcctggatctgttactcatgtgtcatttgacaacaaggctagtcacttctcctctctccgcttcattttccatctgtaaaatgaggggatcagaccagatgacccatcaagtatctttcaggtcataggagaatacaaaatttacactaagaacataacaagaaattcctttttctctttttgtgcatcccctagattgatttctataattatatggaagcatgtgaaaaccctaccatttccaaggatctgaccaacaattacagcaggaaatgtggtcatctaatttaactcttaaacatcatcagcaagactaaaagcttggatgcatcccaattatccccacaaattaatggtgtggtatcaagaataatccacaacacttccacttagctttgggattcattctattttttggtttgccgtagattccaattaacattttggtttattcaggctgattttaaaatatgttgacttaattacatactcaagccatctagtctacaaatatgcctagttagataaaagagataatattcttgaatttgacatagtccttgaatttctaagggctgttttacactgagacctagttacatggtcatatggtttatccgtgtccccacccaaatctcatcttgaattatagctcccataatccccacatgttgtgggagggacctggtgggaggtaattgaatcatgggggtgggttttcctgtgctgttctcatgatagtgaataagtctcacgatatctgacggttttataaagaggagttcccccgcacgagctctcttgccccgtgagacgcctgtagacccagctacttgggaggccattgctcctccttagccttctgccatgattgtgaaacctccccagccatgtggaactgtgactccatttttctttataaattacacagtctcgggtatttcttcataggaatatgaaaatggactactatgcatggtaacaacagagaactctgtggtgtctgcccagctcataattccttctcctctaagaacagccctccattctaccccctgggtagaagccatgttttagtcacataacaccattgcctagaactcagctaagtgcacaatggctgagcaccagaaccaaattgagccaatcagagccccttcttaggaatttacagttgtgactgaaagtaaaatctcaatgacagttcacttatacagacactatattaacttgagaactgaggctcagccattgtcttaggagtagatgagtaatacagatatatttgcaaagacatttgaagagaaaaatggaggacaaaataaagaaagcctgttttctgggctcctcatggctctccatctctagtcccttttgagtcacggctccatctctgctgctggcttccagaatacattcatgtcttctttcattatcttaaattctcccttcctgcttagactaattaaaattgatttctgttattatcaacaaaaagaatcctgctaaataggcttttttttgtaactgaattgaaaattatagcttgcttttttttttttttttttgcattaacttgtagcttaactatacagagaagtggcttggcaccagagacttcagataactaaaacatgattcatattgaggatattttatcttattttctgcaccagtctctagttctataaagcttaagctttactgtataatgagaatgatacactgaatttatgaggttaaatggagggtcacagcagtggaactttttattgtaatgtacaactgcattcctgaatcaggcacaggttaatacataataattattctctggaaacaatggcaaagcattcctagcaacagacaaatcaaatagctactggagtattatggctgtcatttgttaattactcycagatagctgcaaaacacacatgctcttcggcaaaaactgaaaccccaaaccccttagagaaaaaaggaggatcaggtgctacaatgcaaagagcaccaaaatgggtgtctgctgatgtgaacccatctttgcaactatcttcacttctgtgaattttagcttcttcatctcatttgaaatacagaaaattcagcatgagatccaaaggccaaaagtagctcaatagaccatgtgctaagtccttctttttctgaacatgttgttaaacattktatgcccccatttcctcaactgtataagggaaatgctacttgtacctacctcatatggtggttgtggggtagttattacatagtaagtgcttggaagagtagcacataggagtactcaattaatgacagctatattggttttttatttttttattattcctgaggattttttttaaacaggctaactagttatgagcatctcactggtatatttactttgaccattgccaactatatatttcatgtagcttgttaaacaaatttataactgtaaccaaagctaaatatatgtaatgatggtattttaagacattcaagttaaattccaytaaaagtaaatcactaaactggggtgacataaagcatgattgaataaggaagaatgggtctgaagaaagcctgccgatagcatctgattcatttttgaatcatggccaatttttatgctacargaatagctttccatgttgcctttacacttctggatttcatatcatgagggtaaattgctgaaaatgtayacacaaaagaaaaagaacataaaaaacatatacatattctatttgtttgagttctaatgttgctttcaggtcagacattctggattttcatggttttggcttcagaaaattctaagtctagaaagcagctgtttctatgggtatcccaaagaagaaaactgctacatgaaacaagagcaaactgtggtctcatctgcacatttgcagagtagcatcagatccatggagatgctgctcactgaaaaagtaacacccattgtgttggacctcacctacgtgacctttccrgggcatagtctggaaggacatggaaaattaaaagagaagttaaacactgcacaattaagtgagaagaactttgaatctcagtgaataactcaggcaagacaataggaagagaatggagataaggagaaggtatgagctacaagaaggaaggtcagccctccgccaaaccagcaagatattccctgtggtgaagaatggctgatgaatttcagcacaaagctatctaatgttcagtttcaagttgctatctacatgatgctatgccatcatccctccattactkcaaagcttcagtaaaagagagaaagaaagttaacagcagaaatgaggagcaatatttaggaagcataacggggcataaagacatgtaaactctacaaaattacacaggtgagacttttcgatagcaatatcttatttcaattttaaaattcaggctcagaccagaaagtgagggtacttggggtcacccacacaactgacacttgggtgacatatgtattcctacacaatggagaaatacctcttctacatgatggcaaatatccctgtgagtgttatctccttatctttcactttatcttaccattgtctggtttgtttagctcctacttggggcctattccgtactattgtgtcctcctcatttattatggttacattccgcttcttaaacaattatgtctactatagctccatgtttatgtaaaacagtgactgtgtactgatgtttagtcacaataaaagtagcccatacaaagtaaaaaagagttggatttcaaaggacaaacacaatttaagactttttccctttgacattgatttctttcggtacrtcagccaatacataaaaacatgtccaccttatcaaggccaaaggttaactaccaagagcttcattgattccacaaatatttattgttcatcagtcctatgactgacactactagggggtagggccacagtaggaataacaaatggtcacaatgtagttagggaaagagaaatgaaaacaaaactggaagccggtatatacaccagrccaagacaatataaggaggttatcaaaagcctctggcatgggaagatacaaaaacttcaaaagaaggtgacaattggagccagttttgaagaatccatgagggttcaccaagccaaaaggagggcaagggcatgaacttacaagtaactrccacattattgagggaagtttggtcatgtggggaggtcagcggaagaaaagggaaaggcaggcagcgttggggttgtggagatgtttgcatgcttgagatgtttggcctttaataaccatggagagccactgaaagttgataatgataggagtgattaagaagatatcttgcttcagaaggatggcttggaaggagatagaaatggaatctgaaagtccgcaaaatctacaacttttgtcatgattgtggggaagaaaagggaaattaaatcattattattaggtaggcttaaataggaaattttatttatttccctgtgcctggctgcctgaatctaatagttgaacttgcctaagggaagagggtcaaaaaaacaacctgtcacttatttcttcctcattccccgcagacaattcccaaataagaatttctacatccaagcaattccttctgctttcctgcatttttttttgaggcggagtctagctctgtcacccaggctggagtacagtggcacgatctcggctcactacaccctctgcctcctgggttcaagtgattctcctgcctcagcctcctgagtagctgggattacaggcgcccgccaccatgcctagctaatttttgtatttttagtagagatggggtttcactctgctggccaggctgttctcaaactcctgaccttttgatccgccygccttggcctcccaaagtgctgggattacaagcgtgagccaccgcgcccagcctctcctgcatttttaactgcgtctggggcagtctgtattaattagctctacaatctcttagattcccatcccagttgctaaaagggaaaccttctgcctccaccaatatttcaaytgccaaaggaggaccatagggcgtagtgtgtaaatggcagagaggaaggtgaagtccacatcattctgagttcctagagcagcaccaactgttttcacatccctgggctggattgatttgtaatcctcctctctcctaccctcgacctttaccacctcagtcaatctctggaagccaaattgggttcctatcctggctacatacaatccattccaaatgaccttttgccaaatccccatggagtttagagatccttctggggatttttaaagctttrttgttttcagatcaaactttctcttttatttctctttcctcgctagggcttaggaggagaactcagctttcagtttgatggtgaaatattagttaaacacatcatccccaaagggatgtatttgcatcttctatgaacgatgatggaaacagtctcagtttatcagcaagatggctgaggatgcacttacctaaatgagcaatgaagattcatctgctacagctgaactgtatttgcataggctaacttattgagaaggaaaagttaggtttcagtattatataaaatgtgtttgttttgttttttgtttgtttgtttttcggacagggtctgggtccatcacccaggctggagtgcagtggtgccattgcagctcaccacagcctcgacctctgggctcaagtgatcctccctcctcagcctgccaggtagatgggactacaagcacgtgccaccacatctggatactctgtgtgtgtgtgtgtgtgtgtgtgtgtgtgtatttttagtagagatggggtttcactgtgttagccaggatggtctcgatctcctgaccttgtgatctgcccgcctcagcctcccaaagtgctgggattacaggcgtgagccaccgtgccaggctcacatctggatacttttgtattttttgtatagagggcatttcaccatgtcacccaggctgttctkgaactcctagactcaagtgatccacacatctcagcctcccaaagtgttgggattacaggcatgagccactgctcccagcctggatatatagtatgaaatatttttaatggtaaattaattatgagttgttgggcaaaatttggctgcttatttgtaaaacaaactagcattttttaaccatattctgctttgtattgtctctgtatgaatatctcttttatactgcagcaagaggaaacctgagaaggatagttctgtcacctccattttttcttcagaataaatgtcaacatctatgagttcttctttacacaagtttaaatagttggtgctagacagacccagaacaaacatctgaaggaatcccctgaaaatatgaggtcactaatataagtgacttatccaatgtcacacaggcagtttgtggcagagcttcaattctacccagatttcctggttcttcatccagagctctttagctacttttctgtatatgcaaattgcattttcttccaactgtcttagcagaaagagtaaaaacaattacgttataggtttaagacttccttgaggctggtgcagtggctcatgcctgtaattccagccctttgggaggcctagagggtcagatcatctgaggttaggagttcgagaccagcgtggccaacatggtaagacccctgtctctactaaaaatacaaaaattagccaggtgtggtgggaggcatctgtaatcccagctactcaggaggctgaggcagaactgcttgaacccgggaggcagagactgcagtgagccgagatcgtgccactgcactccagcctggacaacaaaagtgagactccaactcaaaaaaaaaaaaaagaaaagaaaagaaaaaaaaagacttccttgaatagctgtgcttgtgcttggtggtgtgcgcctataatccaagcgacttgggaggctggggctggaggatcactggagaccaggagcttgaagctgcagtgagctatgatcgcaccactgcactcaggcctgggtgacagagtaagtccctatctttaaaaatatatattatatgaaattgaaaaaaaagaacttccttgaataatcccacccacctgtgttgttatcctggttagtaaataatcgtgagcaatggtattgatttatgtgttcacataggcaacaagcatttgtcaggcatttattattgtgcctcacatgaggctaggcagttggagaacaatgagataacacaatgtagatttttaagggcttcatattgcaaaccgtaagacacactaaaataatgggtaatatgtgctctaatcctggcatgtgaaaagttctggaatataaaggagagaaggctgaaaagtgaagggtgcaacctaagactctgaccagtgactaggagttttccagaggaggaagaacgggaaaggcatttcaggaaaaggccagcatgaacacgcatatgaagctgcacgcaggtgcagaaaaaggggtaggtgttagtcttctggggctaagtaggcagaccctggtttctgccacccctgctaagtttaatgctttctgacgacagacacaaggtgttcaaacctaagttgatagttctcttctcccctgatctgcagagtggcagcctattttttctgactgtaaaatggactacaagagaaaattcctgctcagagggtgccctctcttggtaagcgtgcacatgcagtgtttctctccaagaaggaaaaggatacttcaaattgcctatagtgtcaccctcatgcaaacctataaaaagaaggaaaaagatacttcaaattgcctatagtgtcaccctcatgcaaacctataaagaaaacacagtttccctgacaggtcactttagttgacaataagagtagatgtgagggaaagagccacagactgagaaaaactggatcccacaggcctagcgacctgatcataaaatcagtggattgcgccaaatgttcttagtccctcctttttctgatgtactctgacttctagaagctatggctcactagatcttggctaaatttaaaattcttgctacttaaaccatattctcagaagttaaggactctgaggaaaccagagaatccccaccaggagagaaatattgtttctggctgtggcagctttcatctctgaatgttccttagcagccagagataattggtccatataacttttcctttctctttttctcacattctagcagtaaaaatcctttttgaagatggtcaataacatgaggacatagagcagaatcacattctgtttctacaaaacacccccaccaccattttaaactacaaatctgccaaacaaaagatcatccaaaagacactttttgagtgcattgcagaactgggagggtatcttcttccgaagtaatttcatttttcaggcttgcaataataaaatgatcttaagagtgctgagagccaacagctgaggggagtagagccaccgttgagccctgaggcttggtggtatcctgggatttggacattccccacagataattccagcaaatgcattattataggggaaaacagttccttgaagtggggaaggagactgagagtgtggggaggggaaagaaatgagccagaggcaaactgtgtgtggtcatgtgggaaaaaattagcttattttttctgttgtcgcccaaagaatgtcactggtgatataaagaagtggaaaatgagaaaactccatgatcatccaaaagccattattgtccatttcctgatcctgatgggaaggaaaattggaccataaatcttagacttacacatggtcrtggtctcttaatgccctctgctggcgaggaggcagactgcagctgcctgcactgtgttatagtggacaaactgcatagtacctctaggcttcatttccctcatctataacatggggataataatagtctttctcggccgggcgmggtggctcacacctgtaatcccagcactttgggaggtcgagacgggtggatcacctgagctcaggagttcaagaccagtctggccaacatggtgaaacaccatctctactgaaaatacaaaaaataaaaaataaataaataaccagatgtggtggcgcacacctgtaatcccaggtacttgggaggctgaggtgagaggatcgcytgaagccgggaggtggaggttgcagtgagccgagatcgcaccactgcactccagcctggaggacagagtgagactccatctcaaataataatcataattaataataataatagtagtattgctcttagagaaacgttgtaaagattaaaggaactaacatatataattcattcaaaatggtgctagctataaattagaatggccttgttggccacatttgtttcctttctctatctccagttttttgtttgttttcccaaatcaaaacaaatcaattacagctctgtaattggtgtggtggctcacgcctgtaatcccagcagtttgagaagtcgaggcaggcggatcgcttgagcacaaaagttcgagaccagtctggccaacatggagaaaccccatctctactaaaaatacaaaaattagccaggcatggtggcgcctgcctgtagacccatctactcaggaggctgaggctggagaatcacttgaacccaggaggcagaggttgcagtgagccgagatcacgccactgcactgcagcctggatgacagagtgaaaccctgtcttaaaaaaaatcaataaatgtctatcacactttcattatgtacaaagtatcatatatagtagatattttgtccctatcctcagtgaattaaatctattttgaagatgcaacacaaaactggtgaaaagttaaatcttaggaagatttgtatagaatattcagtcatcaaaagaattttaattgggaagtacattattaattctaaattagttgtgcatacaatgaaattttcagaggagaagggtaatgtaaaatgttatgggggaggtaggatttggacttggtattaaagatggattttaggtaaggatgagcaaagaaggcataagaaactagaacagcaatcaatcaatcaattaatcaatgaggcaaggtaatgggaaggagagttaaggaaaagtggagagacaagggatgacacagtttttccaaatatatgtgaataatgaaaataaagctgaaaagtaggttggtgctaacagaaggctaagctaagaactagcacatctcaatgttacagaagaaagccttctgtagacaggggaacatatataaaaggaggtacagtatagaagttacaggtgcaggctccattgccactgcctagattcaagccttggctctgccacataaaaacatacgaccttgggcaacttcctcaacctgtctgtgcctcagttttctcatctgtaaaatggagggataaacttccatagagttgctgggaggatcggatggctcagtgcatgtaaagcagttagaagagaacttagcacatagtaagctctcagtctatgtgaattatgatgatgacaatgtaatgatagcccacctcttaggtgatccttcactattccaggattgaagtcaatcctagctttatacaattgctactagtaatagggcacttttttcactagctttatacaattgttactagtaatagaataccattttctcttagtaataatggacttcctgaaacmactggacccttagaaacttttagtgaactagagaaatgcaaatcaaaaccacaatgagataccatctcataccagtcagaatagttactaccaaaaagtcaaaaaataacagatgctggccaggttgcagagaaaagaaaacgcctatacactgtcggtaggagtgtaaattagttcacctattgcagaaagcagtgtggtgattcctcaaagagctaaaaaacaaataccattcaacccagcaatctcattactgggtatataaccaaaggaatagaaattattctaccatgaagatacatgctgtgtatgatcactgcagcattattcaaaatagcaaagacgtggaatcaccctaatgtccatcgatgacagattacataaagaaaatgtggtgcatatacaccacagaatgctgcatagccataaaaaagaatgagatcatatcttttgcagaaacatggatggggctggaggtcattatccttagcaaactaacgcagaaacagaaaaccaaataatgcatgttctcacttataaatgggagctgaatgatgagaatttatagacgcaaaggggaacaacagacactggagcctacttgagggtggagagtgggaggagggagaagaccagaaaaaataactattaggtactaaggttagtacctgggtgacaaaataatctgtacagcaaacctctgtaacatgagttcacctatgtaacaaacctgcacgtgtacccctgaacctaaaataaaagttaaaaaaaaagaaaagaaaaagaaaaactttcttaggaggttagatattaatatgttatcctcaaaacttgaaacaatttttctgaaaaaagaaacttttaatgagcttatgttttccattyggcttcatataaatagagccaggcaatttgaaagcccaactcaaaatattacttttccctgaagctggatgtattagtcggccgagactgccataacaaaataccagatattaggtgccctaaacagcagaaacctatttttctcacagttctggaggctctggaaagtccaagatcaagatgtctgcaggtctggtttcttctgaggcctctctccttggcttgtctatagctgcttccttgctttgtcctcacatgtttttttttttttttttttgagacggagtctcactctgtcgcccaagctggagtgcaatggcacaatctcagctcactgcaacctccgcctcccgggttcaagcaattctcctgcctcagcctcccaagtagctgggactacaggtgcgtgccaccatgcccaactaatttttgtatttttagtagagacagggtttcaccatgttggccaggaaggtctcgatctcccgacatcgtgatctgcccacctcagcctcccaaagtactgggattacaggcatgagccaccacacccagcccctcatgtggtgtttttgctgagtatgcacatccctgctgtctccctgtgtggtctmatttcctcttcttcaaaggacaccttaatggcctcatggtaacttaatcatgtctttaaaggccctatctccaaatacagtcacattctgaggttagggattcaatatatgaattctggaaatcacaattcagcccacagcattaaactaggacctctttcctcattataatatttctctaatcccctgccaagatctttttttatcaccattatttcctaatattggaagagatgtgtttgtgaayggcttattcattccccaaatatatattcaatgcttagaatgtgcctgccatgctctgggcccgtgtacagggatacaatgaatacaacaaacttcctgccttcatggaacttactttctagaggggagagtcatatcacaaacaaaatgcatgacaacactaagaacatgtcagatggggacaagtgccatagaaaataagcagaataaaggagaaaaggagtggcccagggatgrakgtgacatgatttggctgtgtccccacccaaayctcacctcaaattgtaataatccccacatgtcaagagcagggctaggtggagataattgaatcacaggggcagtttgccccatactgttttcatggtactgattaagtctcatgagatctgatggttttataaatgggagttcccctgcacaaactctcttgcctgcctatatgtaagatgtgaatttgttccccattcaccttctgccatgattgtgaggcctccccagccacgtggaactgtgagtccattaaacctctttcctttataagttatccagtctcaggtgtgtttttattagcgaygtgagaacacactratacaggaggtttttcttttataaggaatggtcatggaaagccataaaagtcatagttgagcaatgatctgaaggaagcagggaaccagctatgcagataatcggaggagaacatctcatgtagatagaacaggtactatgcaagtactatgatcctgaaatggtagtggcttagagtgtccaaaaaacaccgaagtggctagagtagaacaggtgagggagaaagtatttgaaaatgagaggacagaggtaggttagccagcttgtgcagtgccttactgcccgtgtaagaatgctggcttttgatggagtgaaatggggagttattagaaggttttgagcaaaggaataacatggtttgacatgtgttaaaatgctcactcaggttattgtgttgaaaatagactaagtgaggggyggtggagaaatctaagcaggtatgctagttgcattaatcaagttgggaggtaagagtgggttggcaaaaaaaaaaaaaaagtcaaagcggtgaagatggtaagagaagtttgcattcccaatatattttaaatgtagagcccccaggattttctgctattccatatggtgcttgcacctccctctccggattgctttcagcatcctgacaattaacactgtcaaagttttagttgcatctgagcattctctacatcttggaggcaaggatacatctaaaatccacgcatgtcctcccaagtccaatctacacatcaaataaatgaacactaacattatataaatcctacataggaaactagagaaagataaagtagacatctttattcatctataccctaatcacaggttataaaaagtccaaagccaaaaggaatgcagaatgcctccagatggtatgatattcagataaggaaatacagaatgtcatcatgggtgtgaaacatttctaaccagaaaagggaacaagagcagcagaaaggaaagcagaccagggaagtgatcacatttgttatccctaaaacagggtagctagcatgatgcaattattttttgtaagggttcttgtcaatactttcaaaagcaagctacaaaactcttctctctaattgctgaagttaagaggaattggtgtcatttttgttttccttatttaagacaaagaagttagcctagctctactcatcttttccttccttgcttttctttcatacattctgagatgttaggtcaagatttttttttttgagatgsaatcttgctctgccacaagactccagtcaagctggagtgcagtggcacaatctcagctcactgcagcctccacctcctggattcaagagattctcctgcctcagcctcccagtggctgagaccacaagggtgcaccaccacgcctggctaatttttgtatttttagtacagacagggtttcaccatattctccaggttggtctcgggcctcaggttatccacccgccttggcctcccaaaatgctgggattacaggtgtgagccacagcacctgccggtcaagataatttttgttaagtaaaagttattattactactattgcagtggcttccctcttatccacagtttcactttccacagcttcagtgaacctctgccaaacacaatctgaaaatattaagtgaaaaattccagaaataaactattcgtaagttttcaattgtgtgctgttctgagcatcctgatgcaatctcatgccgtcccactccgccctacctgggacctgaattatccctttgtccattgtatccgcactgtacatgctacctgcccattagtcactcagtgaccatctcagttttcagactaactgttgctttatcactgtgcttgtgttcaagtagcccttattttacttagccccaaagtgcaagagtagtgatgccagcaattcggatatgccaaacagaagccataaattgcttcctttaaatgaaagtgtgaaagttctctatttaataagaaaacaaatttatgctagaggttgctaagattggtggttagaatgaattttctatccatgaaattgtgaaggataaaagagaaatttgtgcctactacatacttgagatgaagagattctactagattttctgggtgggctcaaaatgccatcacatgtatccttataagagggaaacaaaaggagattttacacacacagaggagaaggcaatgtgaagacagaacagagagagatttgaagatgctggctttgacgattggagtgatacgaccacaataccagtagccatgagaagatgaaaacagcaaggaccagaacttctccctcttgatcccctgaggggagtacagcctcaccaacaccttgtttttggcccagtagtactgatttcagactcctggcctctagaatcatgaaagaataaatagccaattttttaagccacgaaatttgttagagcaaccacaaaaaatttatatacccacatacttcaggacctacaatttaagtaggtgatttacaaccctaaacagctgcttctaaacatttcttcacctttctccatcaaaatcctgagctggcgtggtgtccatacatcagtgaaggacatgttgtcagacttactcgccaaatgcctcttcttttcacaattgtctagcaacctcctgaccaccattgtcttaccaaggacttgagcacttagctcacctcattctcttccctcttacacttttgtccttctagacaatttcagcaatgctctgcccctgcagattttttattatctcaactccaaagatatgcccttctgctatacactctaatggtcttccctacatcttgtcattgcaaataatttcagaatctcaattccggtcatacccctcttgaagcaccactgccagtcctcccagtgtgccaactcctcttctctgctccaactctctttgaccacacagggaccaccattgcactcactccaccatttatcacaatttcccgccacattccacccacacaccacatgccctcatatccctccttacccagtgtacaggttttggtgtagtaacagaactatttccttcctaacaccctcttgcgccaaccttctattctgctyactgactaacctccaatctgcttaaccaaactatctgcctactttgaactactatctcaatttaaattcatgacaacccatgtcaaaggggaattcaacactgcccagcactcctaccctacttctctaggatatttgtcttcctttttgtcaaaataactatttcaaaaattcacctcttttaaaatatacagtacatttcctccactcaaattctgckaatgatcttaactcattcctcggtgagagaaaaaaaaaaaaaacccaaatatcagatgaaacaaacctcatattctcaccaccaaagctgttctaaacctacttatttttcttctcttttgataaatggaagcattgtccctacctctagttccacgtttcctctggatttcatcgctgttcaaggaacttttccttttctctctcatattatcyttttctctctcatacaacttttccttttctctctcatattatcacttgccctttcacaactcacaacccatgggctcgcatgatgctttcatatcactcatctaaaacaaaaacgaaacaactttgtttcactgacaccctgctttctagctatttcccatttctcttcaatatttcacaaccaaactcctcaaaattatttttactcacggtccacttttttaccttcttttctccacctatttttaggggttttctttctcatcccaccctatgaaaaccccttctaattttagcaaaatctcaaaactaacagtcaactgtctattctcattttacttgatcgatcactcagcagctttaaacctagttggtcactgcctttgttgaacccagtgctatagtttgaatagtgttccccaaagttcgtgtatcggtaacttaatccccaattcaacagtgctgagaagtggaaactttaagaggcaatttggccatgagggttctgtctttatgaatggattaatccttttattgtgggagtgggttagttatcaagagagtagattcttgatgaaatgacaaattcagccctcttcaccctgtcctgctctgctctcatgctctctcttgtccttttaccttctaccatgggatgacacagcaacgaggccctcgccagatggtggcccttcaatcttagatctcccattttccagaactgtaagccaagttatccagtctcaagtattctgttatagcagcacaaaatggactaagatacatacttctccctggattttcatgacactaagtgcttctgattttcctcttatctctctgttcactcctctttattatttgttgatttcttcctctctgtttaacatttagatgttgggatactctaggctctgtccttattcctcttctcttcctaatgtacaccttcttttaatgtcatctcattcagttctatgactgtaaatattacctatatattgataagtctaaaatctatatttgcaacactgacttttccactaagatctgaactcaaatatccagctgtcttctcaccatctccaatttaatcctaaggataactcttgattcacctcccaaatttactttccttcagtcatccacatcactaaatgatacctccatatacccgagttgttcactctgtgaccttggtaataagaaccatgaagtcttttcaatcaggcatctctcaacttgttgttgttgttgttgtaacagagtctcactctgtcgcccaggctaaagtgcagtggcacgatctcagctcactgcagccttcacctcccaggttccagcgattctcctgcctcagcctcccaagctgggactccctcagctgggactacaggtgtgcagcaccatgcctggctaatttttgtattttcagtagagatggggtttcaccatgttggccaggctggtcttgaactcctgacctcagatgatccaccctccttggcctcccaaagtgctggtattacaggtgtgagcgaacatgccaggcccatctcttaccttttgtatctcaatcctatttcagagtcttagaaactctccattattttctttgcaccatcttagtataccttcaatagtaaggtagccctggtttctccagttagctacctttcttggacattgttctctactattccagcatattgccattcagtgttatatagggcatgagacttctccaggaacctggcagtcttccaagaatatactatgtaatcaaagctgaaccctttctgccttggagtgcccatctaggtgattatatagtctttcttctaaaagatggtatagggagtgttggggagaagcgtcttctcagggayacactaacatctaatctcttgtcacctccccttagaattcctttttcaaatcttcctcaagaataggaaggctggccagttgcagtggctcatgcctgtaatcccagcactttaggaggccgaggcaggtggatcacctgaggtcaggagtttgagaccagcctggccaatatggtgaaaccccatctctgctaaaactacaaaaaattagccgggcgtggtggcaggtgcctgtaatcccagctacttagggggctgaggcaggagaattgcttgaaaccgggaggcggagkttgcagtgagccaagactgtgccattgcactccagcctgggtgacagagtgagactgtctcaaaaaaaaaaaaaaaaaaaaaaaaggaagactgttcacattcctcactttctctttcctacattttggcctgttatataaaytttatgcttttggtctcttgatacacaaagccaatattttgtagttctaaaaatggcctttgctttcccccacaatgcctggctcaaagtctatggactttggtataagcgtacagaattttacaaaggagctcaagaatgatgaatttgactcttccaggctgtgtctctcctgagagtcaatacccttagaaatcttggatgatgaaggagaagagaaattggttcaaataagtcttgggaaggagagggagaaccaacaccatagcatcttaaaaatattatccctagctacattgtttttcattgttttgtaggtttttatatttttttctgtgtcttctgaggaattttactgggaagatataaaaggctacatcaggggcttccagccaagtgctattttaaactgaaggtctttgttttttatagaagtaaattttacatacagtaattttctttcatcccatgcgttttcttcatggagccatacctgagaagaaagagccaggaaccaagctcaagtctataaggggcaagcaccaaaataaartagaagaggatctaaaagagcttggtatacctcmtggtttgctgcaagccacatctggttttattcacacattagataggtagtatgttagtttcctaggactgctataccaaaatgccacaraatgaatgacttaaaataatggaatttattctctcacagttgtggagactgaaagtctggaatcaagatgtcagcagggttgtttacttctggaggctctgagggagggtctgtcccaggcctgtsttccagtttctggtggtggcctgcagtccttggcattmcatggcttgcaagatgyctcgctccgatctctctctatctttccatagcatctcctccctgtgtgtctctgtgccctcacacagcctgcttataaggacaccagtcattggattaagggcacattacttctccagtgaaatctcacccttaactaattatatctgccaagaccctatttccaaataaggccacattctgagattccmggtggatgagtttgaggggagacattattmaacccagtatagatggaargaaagacttttaagttgcgacaaaatatggcagtatttctccagaggctgccaggtgaggctcccaagtgagccacctgcttgattacaagtaggaggctgagaagggtggtaggttgaaagttaggttatgtcctcttagcataaatttgagggacaagtggacttttgaaaatctagatggctagcatttggttttgttcattattgcctttctcacttttctagcatctacagcatctttccctctttcactttccattctatctagtcaatagttccagcgcaaaaaaaaaaaaaaaaaaaaaaaaaaaaacactagactagaattcaaaaacattgctttaatgtcttgcttctgtcatttactatctgtttggactcgagaaagtcacgtccctgtgcctgaatgtcctcaactgtgaaataatcaaactcccaatgcttttttaaataagtttataacatttttacctctgaagttgacacttctctaaggcactaagacttttgggataccatattttatcaaggaagcaaggcactctgaaataccagagataaattttcatccagaatagttgatatacaaaaatatgtttgttttaagtaataaactctacttacctaaaaatgtatttatatgggacacatatttatctggtattattaagtaatattccaggccagccatcaaaatgaactacactgcaagtaaatatgtaaacaactgaagacccatagaatacctgcccaatgggtcttgaatgctccatagaataagttatgcatgtacctgttttattcatattttatgcagtagaaaagagagatgagagggtgagagggaaaaagggaatgagaataagctcattcaattccactgcctctttaagcttcaattttctcattttaaaaaattgggttgataattccttttttcctctgagctctacatttgttatacagtgtgctttcagtatcacattatcaagctctaaagtgcttagtaccttgctagcatatggtaagtgcacaattcatatttgtaataaacgaaggaattagtatgtcaaggctacctcaaggggttcttctgaaatgcagcttgttattgtttttacctatgtcaccctgtcatccgtcccagtttgcctattgccaagtttttttctttatttagcagcccctgctttggccactagatggcrccagaggaaagttccttaaagacagcaaaagaaggaaagatgggtgaggttagccccagtatgaataaaggagccacccaggttaattaagtaaaacaagcacccagcatttcaccgaagacattgcaaggaagtgaagccttcatgagactggacttcaaatgaactttsagcactggtggaaacagaaacaaaaaactctctgcyaatagaaataagatactggaaccaaagacaatagccttgaacaaaacattccgggacaccacgggtatcagcagaatgggggcaatctaagaagacaggccagaccagatcactcaccatgattaatgattatcaccattacacagagaaacctagatctgatatgaaaactccactcaatagagcagatctgttgcatatatttcagtttaatttaatgtggactaaactatatgtagttctcatttcagagtcaattttaaccaatccttgtgtcatctatttaaagtcaccaaataactcccctaaatattgttacatggaggcacctgggctatccagactcagtttactatagaagtcacgaatctagagtcccgagtgggcaaaagaaagtaggcatctggtacataatgctgccttttaaagcctcgcttctgtctggtgcattgcacgtgacttacagatgcaacagacaactctacttgctgtgtgattctgtgcttaccagaaactttccaattataaatggacttttcctgtagatctgccttcaggaagaaaaagctatgtccttgcaagcacaaaattaattctctgaatctgtcggacttaaaaccttggacagtgttgaattctgtgttgaatrccccctggaatagctcttcacagatcaccaaagccctggtgaccgcatattggcccattttcttcacgtcctttttttctacttttatagccatgattctccatcctggttgcagatcaaaattatccatgaagatttttattaatacagatccccagactctagtcccaaagattctaactcagtagatctagggttgatccaggtatctgtattcaaaagagacccaatagattccaataaggctgaccctaaatctatggtgtttcagaatcatgcatcttctggattataattccataagttagtccaggaccatagaatcatggacgatattatttggaaaaacgtctccagatgcataagaaccccatactacaacatcttcaaatgctcaggttcccatggaagctcagtataaaggaggctgacaggaagacactagcccattgaagcttaacactaagaaaccagcagacctttgggaacttcagcttttaactaggagtatccaaaaagtcctattagctattggagaaaaggctactgatgccctagctggccaaaaatacatatatgagaccaagaccagatacgtaatttgtgggtcccagtgcaaagttgaaaagttaagaatttcaagatggcaacagcagagcattaaaccaagtgtgagctctttctgagaatggaacgttgtgcagctgcacagggcacatgcccatgaagtagcctatgcgggactattgggaccaggctacaactgaggcaggacagtgatttgtacatcaaggaataactgtaatccgatcagtatctgatcttcctctcaatttgcttgtttttctgcatccttgaggcagcctttgggaatctctttaaaatgcaaattcagtagtgtcactcccctgtgcaaaagcattcaatggcatcccattgctctaggatcatatctaaagtcctgagtatggcccacaagtgcctgtgccttctggcccctgtctacctctcccaccttgtgctcccattctctttatgctccagtcacactgcccttgtttcagtgcttgcaattttccaggctcctttctcttcgggtcttcacatatgcagttctttgtggctagaagaatcttccctgtctcttctcacttagctaaattctacttatccttcaggtcataggttaaatgttgcttctgcatggaagcttttttgacccacactgggacacgctgtcctcttaccctctrtttgtcccttataaactgatttccactgttnttaaatggcgaattgtgcaattatctgtttaaaggctatctttcctgctagactacctgcttctctgtcttatcactgccatatcccctttgcttagtgtagtgtctgaaacacaggaagtaagtactcaaaaagtagttttgaattaactaatgagaaacatggcaacaaatgaagaaagggtgaaaatatcaggcactagtatcttcttcttgttgaagaatcacatttacttccaaagcctactgacctaatcttccaaatcactccatacatggcactaaacatcccttatacaaagacagcacaattgtccaggacaatccaatttttagctgtcatcatggagtgcttattaacaacacttacttttgctcaccaaactgcctgtgtggatgctgaattatgtgaatgctctacttatataccatgatccagtaactcatgagccatctctctctctctctttctctctctgtgtaggcgaactgatgacagacagcttctgtgttttggtggctgtggtattaacagcaagcttaagttattaaaccgagcagctttaatcctcgaggtctcctggagcagtagggattaatgtatttttactccagagccaatgtagctattccgatgctctaagatctgctctctgcaatgcccaaactgaccccaattgcctttctctagacccacttctccaccgtgggagaagtgatggaattctacttggagatcgaccctgttaccttgaacctgatcatcctagttgcgagctacgtcatcttgctcctggtcttcctcatctcctgcgtgctatacgactgccgaggcaaggatcccagtaaggagtacgcgcccgaggccactctcgaggcccagccctccatccggttggtggtgatgcacccaagtgtcgctgggccccactggccaaaggggcctggcctttctttgggggatcctgctccactaggaaagaaaagcaccatggtatgaggctggctaagggacaytggggagagaccactagactttccatagrgacaaactgctccctatcgtggctccaattctctcagcacatgtatcccgcttgatgaaggaagtgagagctctgtcttacttgctgttttctcgtcaccttctttgtgacaaaagtaactgtttaaggtaagaagcccaaagtggtctttagtcaaattctccaartgcaaactgtcagcaatgctgtagtataatgaagttggttactggtacatttctgatgttgctgtccttgcaactcacaggagagaatgacttttgagaaaggatgcaatattgtgtgtgtgtgtgtgtgcacgtgcacgtgcgtgtgtgtgataaggaatgagactaactccagtctagtctattctttgcaaattctttctttccaaggcaaccagttttttgttgttatttttcttttctttaagagacagagtcttgctctgttgcccatgcttaagtgcagcagcgtgatcatagctcactgcagccttgaactgggctcaagcaaccttcccacttcagcctcccatgtagctaggactctaaggtcatgacaccacgcctgtcttttttttgtagagatggggtttcactatgttgcccaggctggtattgaactcctggcctcaagcaatcctcctgcctcagtctcacaaaatgctgggattatagatgtgagctgctgcacccagtcaaggcaaccccattgaacttgttcagacttcagaacattattatttctgtacctaccagctcttcacgttctattcccaactccaagacagaataaggaatgcatacaactaaaacaacaaagcttggagcctgggttcaaatcctgcctcttctacttgctagctgtgtggccatggttaagttgagccacctctgtgtctcagggatagtgattggaccactaagcttttggggctatttaaatgagttaattcaccaaaagcacttgagacagttcttgacacacagggttagctatgatgatgatcactgataatatttccttccatatgcctcataaaaaatttaatctccaatcctcaaatccggcctgatccaatacaaagttattgaaaactcattgaaagaattctgagaccccacagcttggtgtatctgtccccagaacactgcctgctctcccttcactctctttgttgatgttgaatkgtatgttttttcccctgttcattagtctatttccaaaatttttgaattattatctccattgtgtgtatttttattaaccctcccttccctgagctcagagaaacgtatgtatttactttgagatktactgaacctcttctttccatcaggacctgtgtggaaataaagagaaatgagtgtcatgaccctgccatatgatctttgccgcccaacagaaggaagcagggtcaggcatgacttagacaatgaaagataagaaagctttgcagatgctcttttagaagtctgcataggatgcaggagtcaacagagacacgagtgtctggcacacagaagacactcaagaaatattcgaataatgttgaatggccaatttcatcttagactcaggtaccaaagataagatgatttgtcttaaaagataagtagttatttttccagaagaaccaaartatgttggaatcttgaagggtaggacaggagatggccttttagaagaagaaataacaaaaacaaagcttgaaagcaaaataattagagtccattggttgtgaaggtctgatggtgtccaacatgtgaagaaaacgtgagaaattcaattttggtttctcctgtagaaaactgaagaggagggcctggccagcctgccctgccagctttgacaatgagcactgttttgcctttggattgttaagtagctgtaacaaacgtgaagataatcccagttactttgttttcaggttttgatgtttatttttaatttaatttgtttcttattttatcagaagattatattttctcttaagtatgtgatttaaaaactatattgaaaacccttcagaggaaatttgttttctttatgagcaagaagccatcttcacttttttttttttttttttttttgttctgagacagagccttgcccttatcacccaggctgaagtgcaatggcacgatctcggctcactgcaacctccgcctcccgggttcaagcaatgctcctgcctcagcctcccaaatagctgggcttacaggcatctgccaccacacgcagctaatttttgtatttttagtagacacggggtttcaccatgttagccaggctggtctcgaactcccgacctcaggtgatccgcccacctcggcctcccaaagtgctgggtttacaggcgtgagccaccgcgctcagccaccatcttcasttttataatgaaaatataaactgaatgaagaaacaccataaattcacaggcagtttctaagaacctaccctttatatattatatacttatattcccatgaaagggaaagaaataagaaggttagttcagatgaagctcacattaagaaaagggcaggttcatatatatatatatatatatatatatatatatattcctaggaatatatatataaaatatgtatatattttaygggaatatatagagagaatatatatattgaatgtatgtatttctttttttgtttgtttgttttcaggacaaatactgacacctttttattgcgttttgcactcttagaggtagaaaacaagscactaacttggttgtggcagcattaatgagtatccttgtggaaggggtgagggggatgttgggctatgaaaccagatttagacaggcagtgtaaatacaacactcaactctgctcttttcattgtgtgtttgttacaaggcaaagcagtaggttggggccactctaatgcaccaccagacactaatagctcatatttacaccagtaaaccaaatggttgcatttagggctaatccagcagccagaggggtcccttaggcttgtgttggtaaaagcaccastcrtgcccaacccagggtttctccagtgccttgtaaagggactgccagcagagctctttaatttttatgtttatcaaatgatgttctgtgtttcttcttatgacgaaagaggaatcatctttaaatgtcagcacgacgcctggcttaagtccgcaggctgatggactgaactaatgggagaattgcagttcggaagaggtaaagtgcgcatgcgcaaagccagtggtctttttaccattctttttttttctttttttttttttattatactttaagttttagggtacatgtgcacattgtgcaggttagttacatatgtatacatgtgccatgctggtgcactgcacccactaactcgtcatctagcattaggtatatctcccaatggtatccctcccccctccccccaccccaccacagtccccagagtgtgatattccccttcctgtgtccatgtgatctcattgttcaattcccacctatgagtgagaatatgcggtgtttggttttttgttcttgcgatagtttactgagaatgatgatttccaatttcatccatgtccctacaaaggacatgaactcatcattttttatggctgcatagtattccatggtgtatatgtgccacattttcttactccagtctatcgttgttggacatttgggttggttccaagtctttgctattgtgaataatgccgcaataaacatacgtgtgcatgtgtctttatagcagcatgatttatagtcatttgggtatatacccagtaatgggatggctgggtcaaatggtatttctagttctagatccctgaggaatcgccacactgacttccacaatggttgagctagtttacagtcccaccaacaatgtaaaagtgttcctatttctccacatcctctccagcacctgttgtttcctgactttttaatgattgccattctaactggtgtgagatggtatctcattgtggttttgatttgcatttctctgatggccagtgatgatgagcattttttcatgtgttttttggctgcataaatgtcttcttttgagaagtgtctgttcatgtccttcgcccactttttgatggggttgtttgtttttttcttgtmaatttgtttgagttcattgtagattctggatattagccctttgtcagatgagtaggttgcgaaaattttctcccattttgtaggttgcctgttcactctgatggtagtttcttttgctgtgcagaagctctttagtttaattagatcccatttgtcaattttgtcttttgttgccattgcttttggtgttttggacatgaagtccttgcccatgcctatgtcctgaatggtaatgcctaggttttcttctagggtttttatggttttaggtctaacgtttaaatctttaatccatcttgaattgatttttgtataaggtgtaaggaagggatccagtttcagctttctacatatggctagtcagttttcccagcaccatttattaaatagggaatcctttccccattgcttgtttttctcaggtttgtcaaagatcagatagttgtaggtatgcggcgttatttctgagggctctgttctgttccattgatctatatctctgttttggtaccagtaccatgctgttttggttactgtagccttgtagtaaagtttgaagtcaggtagtgtgatgcctccagctttgttcttttggcttaggattgacttggcgatgcgggctcttttttggttccatatgaactttaaagtagttttttccaattctgtgaagaaagtcattggtagcttgatggggatggcattgaatctgtaaattaccttgggcagtatggccattttcacaatattgattcttcctacccatgagcatggaatgttcttccatttgtttgtatcctcttttatttccttgagcagtggtttgtagttctccttgaagaggtccttcacatcccttgtaagttggattcctaggtattttattctctttgaagcaattgtgaatgggagttcactcatgatttggctctctgtttttctgttgttggtgtgtaagaatgcttgtgatttttgtacatttattttgtatcctgagactttgctgaagttgcttatcagcttaaggagatttggggctgagacaatggggttttctagatatacaatcatgtcatctgcaaacaggaacaatttgacttgctcttttcctaattgaataccctttatttccttctcctgcctaattgccctggccagaacttccaacactatgttgaataggagcggtgagagagggcatccctgtcttgtgccagttttcaaagggaatgcttccagtttttgcccattcagtatgatattggctgtgggtttgtcatagatagctcttattattttgagatacgtcccatcaatacctaattgattgagagtttttagcatgaaggttgttgtattttgtcaaaggccttttctgcatctattgagataatcatgtggtttttgtctttggttctgtttatatgctggattacatttattgatttgcgtatattgaaccagccttgcatcccagggatgaagcccacttgatcatggtggataagctttttgatgtgctgctggattcggtttgccagtattttattgaggatttttgcatcgatgttcatcaaggatattggtctaaaattctctttttttgttgtgtctctgcccagctttggtatcagaatgatgctggcctcataaaatgagttagggaggattccctctttttctattgactggaatagtttcagaaggaatggtaccagttcctccttgtacctctggtagaattcggctgtgaatccatctggtcctggactctttttggttggtaagctattgattattgccacaatttcagctcctgttattggtctattaagagattcaacttcttcctggtttagtcttgggagagtgtatgtgtcgaggaatttatccatttcttctagattttctagtttatttgcgtagaggtgtttgtagtattctctgatggtagtttgtatttctgtgggatcggtggtgatatcccctttgtcattttttattgtgtctatttgattcttctctctttttttctttattagtcttgctagcggtctatcaattttgttgatcctttcaaaaaaccagctcctggattcactgattttttgaagggttttttgtgtctctatttccttcagttctgctctgattttagttatttcttgccttctgctagcttttgaatgtgtttgctcttgcttttctagttcttctaattgtgatgttagggtgtcaattttggatcgttcctgctttctcttgtgggcatttagtgctataaatttccctctacacactgctttgaatgcatcccagagattctggtatgttgtgtctttgttctcgttggtttcaaagaacatctttatttctgccttcatttcgttatgtacccagtagtcattcaggagcaggttgttcagtttccatgtagttgagcggctttgagtgagattcttaatcctgagttctagtttgattgcactgtggtctgagagatagtttgttataatttctgttcttttacatttgctgaggagagctttacttcgaagtatgtggtcaattttggaataggtgtggtgtggtgctgaaaaaaatgtatattctgttgatttagggtggagagttctgtagatgtctattaggtccacttggtgcagagctgagttcaattcctgggtatccttgttgactttctgtctcgttgatctgtctaatgttgacagtggggtgttaaagtctcccataattattgtgtgggagtctaagtctctttgtaggtcactcaggacttgctttatgaatctgggtgctcctgtattgggtgcatatatatttaggatagttagctcttcttgttgaattgatccctttaccattatgtaatggccttctttgtctcttttgatctttgttggtttaaagtctgttttatcagagactaggattgcaacccctgcctttttttgttttccatttgcttggtagatgttcctccatccttttattttgagcctatgtgtgtctctgcacgtgagatgggtttcctgaatacagcacactgatgggtcttgactctttatccaacttgccagtctgtgtcttttaattggagcatttagcccatttacatttaaagttaatattgttatgtgtgaatttgatcctgtcattatgatgttagctggtgattttgctcgttagttgatgcagtttcttcctagtctcgatggtctttacattttggcatgattttgcagcggctggtactggttgttcctttccatgtttagcgcttccttcaggagctcttttagggcaggtctggtggtgacaaaatctctcagcatttgcttgtctgaaaagkattttatttctccttcacttatgaagcttagcttggctggatatgaaattctgggttgaaaattcttttctttaagaatgttgaatattggcccccactctcttctggcttgtagggtttctgccgagagatccgctgttagtctgatgggcttccctttgagggtaacccgacctttctctctggctgcccttaacattttttccttcatttcaactttggtgaatctgacaattatgtgtcttggagttgctcttctcgaggagtatctttgtggcattctctgtatttcctgaatctgaacgttggcctgccttgctagattggggaagttctcctggataatatcctgcagagtgttttccaacttggttccattctccccatcactttcaggtacaccaatcagacgtagatttggtcttttcacatagtcccatatttcttggaggctttgctcatttctttttattcttttttctctaaacttcccttctcgcttcacttcattcatttcgtcttccattgctgacaccctttcttccagttgatcgcatcggctcctgaggcttctgcattcttcacgtagttctcgagccttggttttcagctccatcagctcctttaagcacttctctgtattggttattctagttatacgttcttctaaatttttttcaaagttttcaacttctttgcctttggtttgaatgtcctcccgtagctcagagtaatttgatcgtctgaagccttcttctctcagctcgtcaaagtcattctccatccagctttgttctgttgctggtgaggagctgcgttcctttggaggaggagaggcgctctgatttttagagcttccagtttttctgttctgttttttccccatctttgtggttttatctacttttggtctttgatgatggtgatgtacagatgggtttttggtgtggatgtcctttctgtttgttagttttccttctaacagacaggaccctcagctgcaggtctgttggaataccctgccgtgtgaggtgtcagtgtgcccctgctggggggtgcctcccagttaggctgctcaggggtcaggggtcagggacccacttgaagaggcagtctgccggttctcagatctccagctgcgtgctgggagaaccactgctcccttcaaagctgtcagacagggacatttaagtctgcagaggttactgctgtctttttgtttgtctgtgccctgcccccagaggtggagcctacagaggcaggcaggcctccttgagctgtgttgggctccacccagttcgagcttcctggctgctttgtttacctaagcaagcctgggcaatggcgggcgcccctcccccagcctcgctgccgccttgcagtttgatcacagactgctgtgctagcaatcagcgagattccgtgggcgtaggaccctcagagccaggtgtgggatatagtctcgtggtgcgccgttttttaagccggtctgaaaagcgcaatattcgggtgggartgacccgattttccaggtgcgtccgtcacccctttctttgactcggaaagggaactccctgrccccttgcgcttcccaggtgaggcaatgccttgcttcggctcgcgcactgtgcgcgcacccactggcctgcgcccaccgtctggcactccctagtgagatgaacccggtacctcagatggaaatgcagaaatcaccggtcttctgcgtcggtcacgctgggagctgtagaccggagctgttcctattcggccatcttggctcctccccgaatgtatgtatttcatgggactatatataaacacccataaaatatatatattatatattcaatatatattaaatttctcattatgtatattcagtgattaatatatatacactgattttatatataaccagtgaatatataattattatgtatataatgatatatataatattgtatataattatatacaatattatataatacataataatatattatattatattatatataataattataaaatataatatataataatatattatattttataatatataataatatattatattttataatatataataatatataatatattatattctataatatataatatattatatattataaaatataatatataatatattatatattataaaatataatatataacataatatatattataaaatataatatataatataatatattataaaatataaaatataatactatattatatattataatatataatatatattacatattataatatataatatattatattttataatatatataaaatataatatattatatattataaaatataatatattatatattataaaatataatatattatatattataaaatataatatattataatatattataaaatatataataatatattatatattataaaatataaaacataagtgaaatacttttaaatgaatgttcttttaaaaattttgaaaattttatttttaataggaatccaagagagaagaatattttattttcttaacttcaatattagatgcattgaacattttatatttctctctcggaaaaaactaaaaatactctaaagagagtgttggaatagacggcattgagttattccaagcctctggttcatttgatttgtgattcattcaatttgttcttcaagaaggaaccaacttctcagtctttaaaacaatcttttcaatataaaatgaagccttagaatcttgtaagaactagaactaagaattttacagaccaggagcagtgactcatgcctgtaatctcagcactatgggaagctgaggcaagaggatcacttgagaccaagagtttgagaccagcctgggcaacatagcaagagcccgtctctataagaagtgaaagaattagctgagtatggtggctggcacctgtagtcccagctactcagcagggtaaggcagaaagatcgcttgagccaaggaatttgaggctgcagtgagccatgatcacattactctctaccctccagcctgggtaacagakcacggccctgtctctaaaaaaaaaattttttttaattaccagcaaggaaataagcccagaagaaattgcgatttcttcccaagaatatttggcctcagagctaacagaaaaaaaagaggagaacaaaaaaagaaaaaaaaacaacaacccaggaactgaggtcctattatcacctttttcctatttgcccctgccacttacctttctacagcatgaygtttacttgcttttattttaaaccttcattaattgtgtcttatttttaaatatagctttattttttaatggaattataagttgcacaactgcaaggttccacctaatgttttaatattttgctattaagacctggtggaatggcttgccagctagaaccaagaggtttatgtgacattcaaatactgccttatttttgtttccttatggaattaggactccctttttccagtatgttttaattcattactcttctatcatgcacatttgtatkaaagcaaatgtagtgttttggcttaatttggatgatagctttgggaaggacccaaaccaaacacttccaaggcaaggaaagggagggagataaatggagatttatcaggaattcgctacgtgccagatactttttattcatgatatcatttaatcctcatgctcccctgtgagatagtcacatctaaaactagttcaaagattaagaagtagaggctcatagaacagctcgagtktgcacaaggccatgcagtttatccatgtaagaagcaggatttgaactcaattctagatgggtcacctcctaccatctgytttttcacagctattaaagagcaggaataaacctatggttgttccaccaaccccatctctctcctctgctagaattgcatgcctaggaagttgctccgtaagcatctgtttaatccaaaggactttcagattttctcctctgaataagatgccctatcagaggaaaaataaattattgtaatttggctggaacatctcctaatattccaaaagacaccaggacagagttggactaagcctgaactttatactggaaaagcctcactcaatttcccctctgtcactatctgctgtttactattttgtgttttttgtttgtttgtttttgcttttttttttttttttttttggtgacagagtctcactctgtcacccaggctagagtgcagcagccagatctcggctcactgcaacctctgcctcccaggttcaagtggttatcctgcctcagtctccccattaactgggattacaagtgcatgccaccatgcaggctaattttttgtgtttttagtagagacggggttttgtcatgttggayaggctgatcttgaactcctgacctcaagtgatccacccgcctcggcctcccagagtgctgggattacaggtgtgagccaccacgcccgacctgtttaacrttttgtgcatcaattaacttcctgagcctttttcctcaactaaaaaaatgatatataccttgagcccaggagtctgagatgaggctaggcsacatagcaagacctcatctctaaaaaaaaaaaatggatataatcttaagatggtcaaggtttagaatcacacacataaagtatctggcatattgtgatatttcaaaaaaaatgaggccactaccagcaaataagatgaaaataagtagaggacttcatgacctgctggctagagacagctcaggatagtttagacacatttatgggggtgttgaggggaaggggcatgaaaggttagacagctgtcacgtgctgtagaaatttggaaagaaaacgtagtgtctgttatgggttgaattttgtccccccagaattcatatgttgaagtccttaccctgtacctcaggatgtaatcttattttgaaatagtgtcattaccggtataattagttaagatgaggtcacactggagtatggtgggcccctaatccaataggactgtgtckttataaaaagggaattttggacacagatatacatgcatatgaagaatggagttatgcaatcacaagccaaggaactatcaaaaggtagaagagaggcttggaatacatccttccgtggtaccttcaaaaggaacatggcctggctgatgccttgacctcagactttccaaaagtgtgaggcaatcaatttccattatttaagccacatggtttgcagtactttgttaggacagccctaacaaactaattcagtatctaaaaggaatgtttaggatgtgcaatgagttgtttaacatgtcaaagctctttagggtcagttacatgattctattggatgtgacattatgctgagttagagtctgggggagaaacttgaaggccaaacttaatagaggctgcctaggaaatcgatgctgcacaagctgagtaaccatttgttgtgggggttttgttttgcttgtttgttcgtttgttttagagacagggtttcactatgttggccaggctggtcttgaactcctgggttcaagcaatcctcctgcctcagcctcccaagtagctggaattacaggagcacaccaccaggttgtgtttttttaagagggtaggctgggcatagtggttcacgcctgtaatcccagcattttgggaggccgaggcgggcagatcacctgaggtaggagttcgagaccagcctgaccaacatggagaaaccccatctctactaaaaatacaaataattagccgggcgtggtggcgcttgcctgtaatttcagctactcaggatactaaggcaggagaatcgcttgaacccgggaggcagaagttgcggtgagccaaggtcacgccattgcactccagcctgggcaacaagagcgagactctgtttcaaaaaataaataataaataaataaataagaaggtagaatacagaagaaaaaatccttagtagaaaaatgtgcttgtggttttgccagatggaatgtaaggtataattgagaggaatagaggtaaaatctctctgttccatagagaaggactagggacaaatcacaaaggaaagatattatggggttcaagcacaaaactattagagtgaagcaaagacagttcggaattatccctaaagtatccaagtctcttccgataccccatatayacttcaaaagccacttagtgaatgccagacacctcatttaatcttcctgaagatttgtaagaggaggaaccgttatttttattttagaaacaagggagtttgagactgtcaygcaaacacctttaggttgaaagggtgggatcagcagaatccagggatcctgacttttagtcctgagtttacactataactttatagctgcccagaatccatgcagagcaacaggatgattcagcaaggtgggtgcagaaaagtcacacttttgagatctgtctctccctgccatcacttttggggartgcamaataacataatctctttgattagaacaattcctgagaactagagggcagacacagayaagtattgcccaagaggagcaagaacagtctctttctcattacgtcatcttccctgaagacactagtgattgagatacagaaagtatgagatcacttattatctacctctrttgtacagttatttcgactttgactttcttgggctgccagtgttccagataagggttttgtaacaccaggattgagaaagattttagctatttcacatcctcccaagatagtaggaagttgtctgcgcatattttttttttctcaaggcttctctgtactcagccattatttaattaaacaccagccatatgctgggatctgctggttctctgcttgacgcattgccagcctggtggcctcaactgcaatttgaagttgacaggcgtacaatacaaagctcaggagacactaggaagaaaaggacttggcttggaggaatcaggaagacccagggagagaaaagtgtgccgctccaagggagggtttgcccaagagtggctcagcggaaacgtggcagtggaatttggaatctggattgtttgtcagaattgataaagacattcttataaggaaatgtatctgtgaaaagttgtttgccactcggggagggagaaaaatgattatagaattttggagacaaaaatgtatacgcagcagtcattatacacatgatcagaaggaaaaccagaagatccaggggccaaaggggaataattgatttcttaaatggcagcaagactggatttgacaactctcacgatcaagaatatttctctgtatttaatctacatctcttctgctcttagactttatattcattttctcttttttacccattattggtctttttcaaaaacaaaaatttgagacagggtcttgctcttacagcccaggctggaaagcagtggtacaatcataattcacagcagccttgaacttctggggtcaagtgaccctcccaagtagctgggactacttgggtgcttgccactaccccctcataatttcctttgtaaaaaaaaaaaaaaaaatttatagagacagggttctcactatgttgcccaggcttgtctcaaactcctgtcctcaaccgatccttacctaggccacccaaagtgctgggattacaggcatgagccaccacgcccagtctattattggttttataaataagcactgtttatacagagatttttataagtgtgtctcatgaacgaatccaaacagattagatcacaaagtgtaataagttatggttatagcagtggttccaatccatgggtttgtagcatgctggtgaatcaccatcagccatcaggtgtgttgtaaatagtttgtttctaataataaattacccaagtttgtgaatgatttacctattaatatacagagggtgagttgaaggtcatttccatcataatgttattctcagttctgtgtactccaattttgttgcttgtatagcacagatacaggtggaggtccggtaaacatgcaaagaattggatatacctacagaccacttatctatttgacaaatatttgtaaagcacctactttgtgcagatgctatgcctggcctgaaggatacaatcaatgcacacaacagacatgagttctgtctttggaaagcttagcaagtggcagaaaaagactataccaagcgctttgcatacattgcctgaattttcactgtaaccctgagaggtaatgtcatcttcccaactttatatattttaggcaactggaactctgaagctcgttctctaaaccagtggctttcaaatgccttttatcgtgcattcctgtcagtgaagataattttagtacttgtgtgtgtgcgtgtgtgcctgtgtgtgtgtgttcaaacaaaatatacaaaagtatacatgtgtatacacttatctatacttatatttgtatatacttatatacttataattttagcactcgtgtgagtgtgtatgtgtgtgtgtgttcaaacaaaatatacaaaagtatacatttgtatatacttacatattacatatacacatacgcatattcttataaattatatgtacattatttgaatcttcttgtacccctcactttgaagaccggctctgcaccactccaccatatcaccttggagtttgtctatgtgtaatgggcataatccacctccaatcttcccccatctaaccccaggttttggtctagattggtagggatgggaactttgccaagaacttgatccaggaagtttttttaaaaaattaaaaaacagtacatttcaaatttggtttttgtattgctaaggatgctttgcagagttccttggtgagttttttaatacacaaaggaaagttcttctgttagtttgtaaatcctagtcctttcccctgtgttctttttcctggctggatcttaagcacctcaaaaaaggagtgcgtgtctcgtacatctatttcacctccccgcagcacccaataaacaaatgaacatatcaggaattctccatcctttggagatgactttgtttctcatgggaaaaaggagagaggatttttacatccattgtagcataagaatactatcctatggaaacaaactgttcctagacacaggagagaataagttgggctgttttgatgtccccaggcatagagggctgggaaagtgcagcaggtagtcttgtgatgaatgaggccacggagagaaagccaggattcacacttaattccacaagcacagggaaggtgagggttgagaaagtgattcaacagattagtccttctgtctctctgcccactttggctccaaattacccaagctgctgctgcttttttttttttttttttttttttttgagagagagagagctctgctgcccacgctggagtgcagtggcgcgatctcgggtcactggagccttgacttcccaggctcaagggatcctcccacctcagcctcctaagtagctggggctacaggtgtgctccatcacacccggctaatttttgtattttttgtagagatggggtttcaccacgttgcccaggctggcgtcaaactcctggactcaagcaatcttcctgccttggcttcccaaagtgctaggattacaggcttgagccaccacatccagcccaaacttcttttcctcagcggaggtgcctttactgaactatcaggaaaataggtgcgacccttgacttgatattaccaacacctctgcttcagttgaccctgtgcttggttctcatccatattcctgattctacagactacaccttggagcagcagcctggggttatggggttctaattcttagcccagccactaacttcctaggaggcactagcttcacttactcagctacacaaaagtaggagtggagttaattaacaacatgccaaggaccttttggctatggcatgtttgaccctgcctctttctttgtttctgatctttcctctcatttccaacctgacctccctgaatgaggaaactagtgacaggaggatttgtcctgaaaaactgcccgtggctacagcattgttgttgatcagggagctgcagcaggaagcttaacagggggctgaggcctttcctttcacagaatgcatgcacacaccccatttgctaacatgttttccatctgacatttcaagtaactgtccccgcgttggtgattctacaagtcaaggtctgttctgcactctttagaaagaacgtaaaccgtgacaaatgttctcagttcaggcatatggtgatgcattgacttcctagttgctggcgtgtattaacaaacttattgtccccaaatgtaaaaaataatgaatttgccaccgtgcatggaactttaacaatgtgaaacatattagatgtgttggatcttcagggaccatccttaatttttagtagaacattgccttttatttccttaattttaagtgaatttcaattgcattgcccctaaaacctttttataagatgttcgcaatagttagcaattgatgtgtgtgtgtttttctttttttttttttaagtgggtgtatttgttagaaattgtgctcagctatgactaacagctacagtgattgaaatatcaaggggaagccgggcgcagtggctcatgcctgtaatcccagcacttcgggaggctgaggagggcagatcacgagaaagaacgtatgaggtcaagagatcgtgaccatcctggccaacatggtgaaaccccatctctactaaaatattataaaaaattagccaggcttggtggcgcaagcctgtagtcccagctactcaggaggctgaggcaggggaattgcttgaacctggtaggcagaggttgcagtgagccaaggtcgcgccattgcaatccagcctggtgacagaataagactctgtctcaaaaaaaaaaaaaaaaaaagaaagaaagaaaagaaaagaaaaaagaaatatcaatatcaagaggagtttgctctctttattttaattttttctttttttttttgagatggtttctcactctgttgcccaggctggagtgcagtgacagcatctcagctcactgcaagctctgcctccctggttcacgccattctcctgcctcagcctcccgagtagctgggactacaggtgcctgccaccacgcccagctaattttttgtgtttttagtagagatgaggtttcactgtgttaaccaggatggtctcgatctactgacctcgtgattcccccacctcggcctccggaagtgctgggaatacaggtgtgagccaccccgccccgcctagtttgctctctttctttcactctgatgttgaagaaaagtggctgagccagatgcagtggctccaacatgccactaatattgcaggcacctttatttctgttctatcagctttacttcatctttgaggttgtcttctcattaaaggctggccactgcagttccaaactttacgtctgagtttgaggccaggaggggagaaagagggaataggcaaacaggcacaagcccatttagttagctgagaggcccaaccagcaatgtatgcttatatttcattagctagaacttaattaaatgtttacttctatctacaaggaagactgaaaggtatagatttttgttagttacattgccatttccaacaaaatcagggttccagtaaaaagaaagagggagagaatgaatttggagcagcagctgccctagtggggttgtttctctttctaaaattaatacacatttgttaaggcaaacttaaaaaatggagcgaaggaaaagaaagagaagataatgatgatattaactcctcaaagtgacctctagtagcatttgtgtgattattttctttttttaattaatatttgaagattttttttctgaccgcccttttttttttttttttttttttggtgaggagacagagtcttgctctgtcacctaagcgaaagtgcaatggtgcaatcatggctcactgcagcctcaacctcccaggctcaagtaatcctcccacttcggtctcccgagtagctgaaactacagcaccaccacatcaggctaatgttttgtagagatgcggtcttactatgttgcccaggctggtcttaaactcctgggctcaagagatcctcctgtctcaggctcccaaagtgctgagattacaggtgggagccacagcacccagcctgattgtatttttctgattctaaaagtaatgcctattcacttgggaaactttgagaaaatacagcaaagtgtagagaaaaaaaaaaaatggaaatcacccataatcccattacccacattatactataccattttgttgtattttctgctgttctaagtatatattttacatacttatgatcatagtgtatgtacaagttgacacctttttctcactttataaataaaataagtaaatttacatatgaccctacttcgagtattcctgggtcctcataacacagcatttcgaatctcagttgcaaatctgtttggaaagtgcttgaagtaggaaagaacaaatagcatggactgattttcccctgcactgtttctgggagaccatacggcagatttggctcacttctcactctcactctgagaccatatcatatgctctcctttctttatttttctatctcaaaaaatgtcaagtgtacaaaccaagagttaaaattattctttagaacatgagctgtcaggcccattcttaccgtatggctcacaaaagtgggttttgctctggcttataaattcatgagatgtcaaagctagaaaaagcccccatggctgtcagtccaaaccactaatgtaacagcgaaaagaagcagacaggaaaagcgccctgctcaggataccacctggcagaatcagtgccagaacccaggaccccaagtgcccttctagtgatttttccaccctactttagatgcttttgatgatgcaactaactggtaaacttcaaaggtgttatgactcccgcaaaaatactcatcgatggccaggcgcggtggctcctgtctataatccgagcactttgggag

SEQ ID NO: 94476 - DNA, 35586 bp, Homo sapiens
  misc_feature (1)...(35586): n = A,T,C or G
gtcatgggcatggatgattggagcctgctgggaacatcacttatcttgggacatgctcctccctcaccccaaccgggtggtttcaggggctgccaaggtccagagcacaggggtggtctagtgagttccagggatttcagggtttagcaaagaaaaagctatgaccaccagatggcagtagcacacaggagctttatttggtggacactgacagatttgtctatgggggagtcacacccagtgtgagaccctccagaggttactgtgtgagggtgaggaccactgcacaggaagggaggaaggcaagggagctcccaagagaaagggactggagaaggggcttacttctgggtgatgccagccaccagcatgtggaggtttctctggatcagagaggtccaaagagcagcaggggcttggggctcatcttatctatgggtagcagatgttgggcacagtttcagggtatacaaagcaggcagactgcatagctaaaaatacctgcttattaagactatgtttaaaacaattggatgtgtagaaatctgagtgtgctgctaccaagcttttaggccaatggtctggcctgctgtgaagaaattaacaacattggctgggcgcggtggctcacgcctgtaatcccagcactttgggaggccgaggcaggtggatcacgagatcaggagttcaagaccagcctggccaagatggtgaaaccctgtctgtactaaaaatacaaaaaaattagctgggcgtggtggcgggtgccacctactcaatcccagctacttgagaggccgaggcagagaagtgcttgaacccaggaggcggaggttgcagtgagcagagattgcgccactgcactccagcctaggtgacaaagcgagactctgtctcaaaaaaaaaaaaaaaaaaagaaaataaattaacaacatagggtaatatacagtggccactggccatcatttatataaacaggactcaggattggtcaaagcagaggaaactgcagggactggttctacaataagcacagatccatgctatctcactgggatgtttaactggaagcttcagcaatgagtgctctctctgtctttactttttacttttagatacgggatcttgccctgtcacccagagtgaggtgcagtggcacgatcatagctccctgaagccttgaactcctgggcttaagtgatccccctgcctcagcctcttgagtagctgacaggcatccaccaccacatctaacaagtttattttttgtagagatggggtcttgctatgttgcccaggctggtctcaaactcttggccgcaagtgatcctcccacctcagcctcccaaagctctgggattacagtcacccaccactgcacccggccttctccctctctccttgtttaagcaacatatatatatatatatatttgagacagagtcttgctctgttgtgcagctggagtgcagtggcgtgatctcggctcactgcaacctccacctctggggttcaaacaattctcctgcctcagcctcctgagtaattaggattacaggtgcctgccaccacgcccagctaatttttgtatttttagtagagatggtatttcgccaagttggccaggctggtcttcaactcctgacctcaagtgatcctctctactcagcctcccaaaagtgctgggattacacgagccactgtgcctggcctaaaggttgggtcttgggacgtttctcgcctccctaggccccggtggcccggccccggatgagtgcccaggagcagctggagcggatgcgcagaaaccaggaatgtggacggcccttccctcgcccgacctccccccggcttctcaccctgggaaggacactgtccccagccagacgccagcctgacgtggagcaaagggtgaggggaggagggctggggctgggcggtggggtggtagtaggtcctcttcgcctactttgagtccctttctgtaaaatggagataatcactacctccttcctccaaactggatttccgaatttaccccagtttgtacttgtgctagagtcagcttcctcgcctggatagtggtgggtggacaggagtggcagtgaggggaggacagtgggtgggggcgggggtcacacatctggattggaagcctagtttttcttctcagttgctatgtgttgtcaatagcaagaaagcaaaaaagaaaatgtaagccaggaagaaaattgattttattcatgccctttcaataggaagaacgtcccagatctgaacatcagagtgtctcagatatctcaggatggtttccccttagacgttttcctttttcggccgggcatggtggctcacgcctgtaatcccagcaatttgggaggccaaggagggcggatcacctgaggtcgggagttcaagaccagcctgaccaacatggagaaaccccgtctctactaaaaatagaaaattagctgggcatggtagcacatgtctgtaatcccagctccttgggaggctgaggcaggagaatcgcttgaacccaggaggtggaggttgtggtgagctaagattttgccattgcactccagcttgagcaacaagagtgaaactctgtctcaaaaaaaaaaaaaaaaaagatgttttctttttttttcagggacaaggtcgcccaggctagagtgcagtggtgcgatctccactcactgcaacctccacctcctgggttcaagtgattttcatgcctcagcctcccgagtagctaggactacagggatatgccactacatccagccaatttttgtatttttagtagagacagatttttaccacgttggccaggctggtgtcgagctcctgagctcaagtgatcctcctgccttggaaggaggtgctaagaatataggtgtgagctactgcacctaacctccccttagattttttttttctttttttgagacagagtctccctttgttgcccatgatggagtatagtggtggaatctcgactcactgcgacccctgtctcccaggttcaaacgattctcctgccttagcctcccaagtggctgggattacaggcccatgccaccacaccctgctaatttttttttttttgtatttttagtagagacggggtttacaccatattgaccaggctgttcttaaactcctgacctcaagtgatctgctcacctcggcctcccaaagtgctgggattacaggtgtgagccaccagacccggccccttagacttttatagaaaggatttagacaagtcacaggtggtggtggtggaggtgggatttctgaactcatgtgctgctttataggaacacaggtaaagttaaacattgtcagtcactgggtgctatggctcacccctgtaataccagtactttgggaggccgaggcaggagtaagagaccagcctgggcaacatagcaagactctgtctctactaaaaataaaaataaaaataattagccaggcatggtggtgcgagcctgtagttctatttactcaggaggctgaagcaggattagtccaagcctgggaagtcgagactacagtgagttatgatcacaccactgtactccatcctttctaaaaaatgaataaataaaataaattaatttttaaaaattcagtgcctacagaagcataggaaaaacaaaacaaaacattgccagtgtttttgggcaatttcattctcttttggagcccccttcacttcaccctcaaaatgagaacgtggggcttccaggtgaggagttctaatgccccaattcctttccagcctgtcgtaggacactcgggagcccagaaatggctcagaagctctgggtcctggagtaggtaaggaactggagggcgtatcaagggagcaggaaaaaaaaatttgcaaaagcaaaggggagtagcattattattaaagtctcctgaatatggaagtacaaatcgcaacccttctagagatgcttaagttcccggggcatctgcaacaaaaccagaaagccctagatccgtagtgatatctttagttcctcaaattcccttggtcaatagcagatcctacttctgcatcaaggaaattgggtgatagtgacgcgcgagtggactacaaatcccgtaatgcatgtgggcggtatgagggcggtgccatgtttaacgtattttagagacacgtgctaggaactacaactcccagaaaggcacgtgcggtacccgggtccccactgtgccagctgtttattttttatttttatttttattttttactttttttttttttttgagacggagtcttgctctgtctcccaggctggagtgcaatggcgtgatctcagttcactgcaacctccgccttctgggttcaaatgattctccttcctcagcctccctagtagctggaattacaggcacccaccaccatgcctggctaacttttttgtattttttggtagagactgggtttcaccatgttggccagggtggtctcgaactcctgacctcaagtgatccgcccgcctcggcctcccaaggtgctgggattacagggataagctgtcgcacctggcctgcttttttttttttttttttaatttttaatttttgttggtacatactaggtatacatatatttacgagataattgagatgttttgatacaggcaggcaatgtgaaataagcacatcatcgggaatagggtatccatcccctttcaaggatttaccctttgatgtataaacaatctagttacaccctttaatttatttaaaaatgtacaattaaattattattgactatagtcattctgttgtgctatctaatagtaggtcttattcatccttttctttttgtaccaattaaccatcccccacctctcccccatgtacacacccccacccccaatcttctttttttttctagtccaaggaacaccaccccttacttgccgacttccgaaggtcaccgggagcgggttctcagcctctcccaagccctggctactgaggcgtcgcagtggcacagaatgatgacaggtgactggctggggatgttggacttctgggttttagggaggagagagctggagacctggaatcccaggtcctggagaggaggggtctgggggccggtgagaattttttatcttggtgagtaaagagttgggcagggtttgggagttttaggtctcaggcaagaggtgactggggtccgggacacttgggaggaggggaggaagaggtcagggggcggggagagggccgacaactgagtctcaaagaggactggactggcgtatccagactcctggatctgagggaggaggggctgggggcctggactcctgggtctgagggaggaggggctgggggcctggactcctgggtctgatggaggaggggctgggaatccggagtcctgggtctgagggaggaggggctgggaatccggggtcctagcgctgaggtttgccattctcatgtcccactcatcctctccaggtggaaatttggactcccagggagaccctcttcccggtgtgccgctgcctccttcggaccccacgcgccaggagacccctccccccagatctcccccggtggctaattcgggttccacggggttctctcgccgagggagtgggcgtggaggaggtcccaccccctgggggcccgcgtgggatgccgggatcgcccctccggtcctgccacaagacgagggggcatggcctctgcgagtcactctgctacaatccagcttctaatccgcccaaaagcggcagccaatcggagcgcgaggacgtggtctggaggtaccgccggagatctgggaccactcagggcatcagggggcgtggtctggtccccattgcgggcccgggaggggaatggtttctatggccaaagtttggttttctcaacactgtctaaatttggattaaaactttgaacttttagtcaatagctttctttctgtctgtctggggttgtggcactggtgtctctgaggggcagagctggagtcgtggactcctgggtcctgagagaggaagggacagggggcttggacttataggtctctgggaagaagggatagagaacctgatccctcggtctgagagtggagggggctgggccaggattcccgggtctgagggaggaaggggtgggaccctgactcctgggtctgagggaggagggactgggaggctggactcccgggtctgagggaggaggggctgggaccctgactcctgggtctgagggaggaggggctgggaggctggactcccgrgtctgagggaggaggggctgggaggctggactcccgagtctgwgggaggagggrctgggggcctggactcccgagtctgagggaggagggactgaggcttctggattcctgggtctgtgggaggagggactggggctcctggattcctgggtctgtgggaagagaggagtgtctgagggaggaggggctggggacaaacttccaggtctctagccttcctggcaacgccccccgaggccggacttccaggatccagcctctattgaggatttgatgcgacggcctcacggggctttggaggtgaaagaggcccagagtagagagagagagagaccgacgtacacgggatggctacgggaacgcgctatgccgggaaggtggtggtcgtgaccgggggcgggcgcggcatcggagctgggatcgtgcgcgccttcggtgagccgggtctgactgctgggagctgtggagtgtgagaaaggaaggatgggggcggggtgatgggggcggaaaatagggactccagtactgcagccaggattctgatattataaaagccaatttgcaggctaaagtaagcgtgtggcgctgtaggctagggctgagtctggcagggtctccgaaggcagtggcccctttctctgggtctgttggtgtagctacaaaaccagtggtttgaggaatggctctgtcagtcgtggagtttgctccggaagccacgaacgggggttcaggagcctcagcagaaacaaggcaaggagagtatgtgtcaaggcgtctgccctctgtcctatgggtgatcatgagactggggtcacgaggggagagggagatcagccccaatccaggtggccacaagagggcggcagaggctttaaccaaggctcggagagtaacctgttcccttcctattctcagtgaacagcggggcccgagtggttatctgcgacaaggatggtgagtgacggtccctcagccctcaccttggcccttcctccctcagacccagaggtccagacccctagcacctcctccctcagaccccggagtccaggcccccaggccctacttcctcagacccaggagtccagacctcagcccctcctccctcagacctaggagtccaggcccccagcccctctgccctcagacccaggagtccaggtccccagcccctcctccctcagacccagaagtccaggctccggcacctcctccctcagacccaggaatccaagtccccaacccctcctccttcagacccaggggtccaggctcccagcccctcttccctcagacccaggagtccaggctctggcacctcctccctcagacccaggagtccaggcccccaggccctactttctcagaccmaggagtccagacctcagcccctcctccctcagacccaggagtccaggctcccagcccctcctccctcagacccaggagtccaggcccccatcccctcctccctcagacccaggagtccaggcccccagcccctcctccctcagacccaggagtccaggctcccagcacctcctccctcagacccaggagtccaggcccccaggccctacttcctcggacccaggagtccagacctcagcccctcctccctcagacccaggagtccaggcccccagcccctcctccctcagacccaggagtccaggctcccagcccctcctccctcagacccaggagtccaggcccccagcccctcctccctcagacccaggagtccagacctcagcccctcctccctcagacccaggagtccaggctcccagcccctcctccctcagacccaggagtccaggctcccagcccttcctccctcggacccaggagtccaggctcccagcccttcctccctcagacccaggagtccaggcccccaggccctacttcctcagacccaggagtccagacctcagcccctcctccctcagacccaggagtccaggcccccagcacctcctccctcagacccaggagtccaagtccccaacccctcctccctgagacccaggggtccaggctcccagctcttctctccctgcagagtctgggggccgggccctggagcaggagctccctggagctgtctttatcctctgtgatgtgactcaggaagatgatgtgaaggtaagccgagttcctgttcctacccccatctccgctaatgaccagttctttgttctcctccagccatttgcatatgcctttccctctacttttccttcctctcctggctccgctggactcgtcaaaggtttccacccagtgtcactccacacacaaggtcttctgtgactgatgggcaggtcacatgttccttctgtcacacctctccaaggctcttagcacatttaacatgtggatggaaatgaataagtccctcaaagtgggtcaactggaactgatttttctgtctctttttyttgtaagtgtcactgaggctggagtgcagtggtgtgatctcggctcactgcaacctcagcctaccgagttcaagccattctcctatctcagcctcccgagtagctgggattacaggtgtgcgccaccatgcccggctaattttttttttttttaagacagagtttcgctcctgttgcccaggctggagtgcaatggtgtgatctcggctcaccgcaacctctgcctcccagcttcaagtgattctcctctctcagcctcccgagtagctgagatttcaggcatgtgccaccacacctggctaattttgtatttttagtagagacggtgtttctccatgttggtcaggctggtctcraactcccaacctcagatgatccgcccgcctcagcctcccaaagtgctgggattacaagcatgagccaccgtgtctggctaatttttgtagttttagtagagacagggtttcaccatgttggccaggctggtctcgaactcctgacctcaggtgatccgcccacctcagcctcccaaagtgttgggattacaggtgtgagccactgcacgtggcctgtatgtaactgattttttctccattatttctgggttcctatttcttccttttaatcagtatctctctgttatctgccccccttgggcaactgtcccctacgcgctctctgaatccttgtcacccccctgccccaccccctgaccctgggtgtgacgactgcagtgtggctctgaccagccccctgtctccttcctgtctcctgcttgcctgctgtgtctgctgatctcggagtcccctcttcctctagctcttgtcccctgacctgggagttcagcttccccctcctgccttgcatttgggagccctgtcttctttatggctggacaccccatctactgctcattcaaaggacatttcctgggctgggcgtggtacctgtaattccagcactttgggaggctgaggcgggtggatcacttgagctcaggagtttgagaccagcctggctaacctagtgaatccctgtctctactaaaaagtacaaaaattagccgggcgtggtggcagtcrcctgtaatcccagctacttgggaggctgaggtaggagagttgcttgaacgcaggaggctgaagttgcagtgagccaagatcgtgccaatgcactccagcctgagtgacaagagggagacaccgtctccaaaaaaaaaaaacaaaggacatttcctttctcctcagaccctggtttctgagaccatccgccgatttggccgcctggattgtgttgtcaacaacgctggccaccgtgagttgtgagaccccagggccattctccacctcctgccccccaactctgtttcctgcacgtcagtttccccactccctgcccctgattccctcatcctgcctcatacctctttctagccacttggacaggagagtaaagcaatggaagccccccaggcctgtgctgaaactgtggccctgttccatccctcctgtgtgtccccagggctgtgccctcacttggccatgtctctcttcttttcttttcttttttcttctcttctcttctttcttttctttttttttcagatggagtcgcactctgtcgtccaggctggagtgcagtggtgtgatctcagctcactgcaacctctgcctcttgggttcaagcgattctcctgcctcagcctcccaagtagctgggattacaggcgcccaccagcacgccaggctaatttttatatttttagtagagatggggttcatcatgttagccaggctggtcttgaactcctgacctcagatgatctgcccacctcggcctccccaaatgctgggattacaggcatgagccactgcacccggctttttttttttttttttttctgagatggggtctcactctgtcgcccaggctggagtgcagtggctcgatctaggctcactgcaacctgcrcctcccaggttcaagcaattctcctgcctcagcctcctgagtagctgggaatataggcacccrccaccacacccagctaatttttgtatttttcgtagagacagggttttgccctgtcagccaggttggtcttgaactcctgacctcatgatccgcctgcctcagcctcccaaagtgctgggattacaggcgtgggcaactgtgtccagcccccgtcacttttcctctctctctcaccccccactttagacccacccccacagaggcctgaggagacctctgcccagggattccgccagctgctggagctgaacctactggggacgtacaccttgaccaaggtgagggctggcgaccctgccgccaggcccgagcagcctcctgataggtggattgtgtgatgcattttgtctaagagcaaaatgttttccgttctttttatttgtttgtttgttggagacagggtctctctctgtcgcccaggctggaggacagtggtgtgatctcagctcactgcaacctccacctcctgggttcaagygattctcgtgcctcagcctcctgagtaactgggattacaggtgcgggccacaaaaccagctaaatttcataatttttggtagctatgcttctgactgcaagtgatctgcctgccttggccttccaaagtgctgggattacagacttgagtcaccacgcctggccatctattttctgttatttagtttaatctccttattccaaaaggaagataaatgactgcgaatctctacatccagcaaatctacctttgtagctacatagcccagtcttaggaaccttctagaaccttccagactggtggtggtaggaggggatgttaagaacatattggggccagacacagtggctcacacctttaatcccagtgctttgggaggtccttgtgggaggttcacttgaggtcaggagttcaagacagctggggcaatacagcgaaaccccccatctctacaaaaagtttaaaaaattaggcgtrgtggtgcccttgtagtcccagctactcaggtggctgaggtgggaggatcgtttgagcccaggaagtcaaggctgccatgagctatgtacacaccactgcactacagcctgggcaacattgcaagatgctgtctcaaaaataaataaataaataaataaataaataggccaggtccagtagctcacagctgtaatcccagcactttgggaggccgaggcaagaggatcccttaagcccaggaattcgagactagcctgggcaacatagtgaaaccctcgtctctacaaaaaatacggaaattacctgagcatggtggtgcgcctcaggtacttgggaggctgargcgggaggattgctttgttgtaaccgagcgagttatagagaaacgccacactctgagacaagatcaggagtcctttattagccggcagcccagagacggctagcgctcaaaattctctcggccccgaagaaggggctagattttcttttatactttggtttagaaaggggaggggggagtctagttaaaacaatcttacagaagtaaagcaggcaaaaaaagttagaaagataaatggttacaggaaagcagacagttccaggtgcaggggctttaaacacatcccaaggtgatagacgctggacgttgggcgctatcaaccagacagaaacgcgggggcttagggtactattaatcgggcgactgcctgggaactgcggatataacttgccacagtatcttatcagtaattgcattctttgatgtgctgggagtcagcttgcacaagttaagtccttgaagaaaggggggttgggttaaggggctgcaagtgaaggagccaggatggagtctgtctggctcgctcacctaagggagagtcaattcaggttaaaacaaggttagggtatcacagcttgagcccaggaggcggaggttgcagtgagctgagatcgtgcaactgcactccagcctaggtgacagagtgagaccttgtctcaaaaaaaaaataattcattaattaatttttaaaaagagcatggagtccaggcatggtggcttacgcctgtaatcccagcactttgggaggccgaggcaggcggatcacctgaggtcgggagtttgagaccagcctgaccaacatggagaaaccccatctctattaaaaatacaaaattagccgggtgtggtggcacatgcctataatcccagctactcaggaggctgaggcaggagaatcacttgaacctgggaggcagaggttgcagtgagctgagatcgtgccattgcactccagcctgggcaataagagcggaaactccgtctcacaaaaaaaaaaaaaaaaaaaaaagccaggcctggtagctcatgcctgtaatcctggcactttgggaggccaaggcggacagatcacttgaggtcaggagtccaacatggtgaaaccccatctctactaaaaatacaaaaattagctgtgcgtggtggcaggtgcctgtaatcccagctactcaagaggctgaggcggtagaattgcttgaacctgggaggtggaggttgcagtgagctgagattgtgccactacactccagcctgggtgacagagtgaaactctttctcagaaaaaaaaaaaaaattagctgagtatggtggtgctcctgtaatcccagctacacgggaggctgaggtgagaggatcacttcaacctgggagctggaggctgcagtgagccgtgattgtgccactgcactccagcctgggcaacagagcgagtccttgtcttaaacaagaattgggggagagctggggagggaatgagaaagaaaacaaacttttttatctgagaaaggagagcccctttagatgatcaggatcaggcccagaggggctttttaacaacttttttaaaaattaattaatttattttttgagacagagtcttactctgtcacccaggctggagtacagtggcacaatctcggctcactgcaacctctgcctcccaggtttaagcaattctctgcctcagcctccctagtggctgggattataggcactcaccaccacgcctggctaatttttttgtatttttagtagagacgaggtttcaccatgttggccaggctggtcttgaactcctgaccccgtgatccacccacctcagcctcccaaagtgctgggattacaggcatgagccactgtgcctggcctttttattttttaatagaggtggggtttcactatgttgtccaggctggtctcaaactcttgggctcaagtgattctcctgcctcagcctttcaaactcctgggattacaggtgtgagccaccgcacctggctcagagggactttataaaaatgtattttaattactttttgagacagggactcactctgttgcccaggctggagtaccatcatagctcacagcagcctcgaacccctgggctcaagtgatcctcttgtatcagcctcctgagcagctgggaccacaggggtgcaccactatgactgactaatttttaacttttttgtagagacagggtctttctatgctgctcaggctggtctcgaactccttgcctcaagctgggattacaggcatgagctactgcacccrtccaataattaccttttgaggctacttggtttcyggactctagacgacctgataccaagtagctctagagtgtcacacactctatagttcaaccatgtatagccaatcactaatcaatgtgatgtctgtaaaccaatgacaattcctgatgaacaacttttgtaatcaccgcctctcttgattcgtccttttttctttaaaaagttgagcctttggccgggcgcggcacctcatgcctgtaatcccagcactttgggaggccgaggccggcggatcacgaggtcaggagatcgagaccatcttggctaacgcggtgaaaccccgtctctactaaaaatacaaaaaattagctgggygcggtggcgggctcctgtagtcccagctacttgggaggctgaggcaggagaatggcgtgaacccgggaggcggaggttgcagtgagccgagattgcaycactgcactccagcctgggcaatagagcgagactccgtctcaaaaaaaaaaaaagaaaaaaaaaaggaaggagaagggttggtcacggtggctcacacctgtaatcccagcactttgggatgccaaggcgggtggatcactcatcaggagttcaagaccagcctgtccaatatggtgagaccccgtctctactaaaaatacacaaaaaattagctgggcatggtggtgagcacctgtaatcccaattcctcgtgaggctgaggcaggagaattgctggaacctgggagatggaggttgcagtgagctgagattgcaccactgcactccagcctgggcaacagagcaagactctatctaaaaaaaaacgaaggagaagaacacacatcaaagcctttccctcacccttgcttatgcaacagctgcacacaaacatccactctccataacatctttattctccgcatagcactttttaattaattaactcaacaaatagttatatagcaccagcaacatgcggagccctgcgcatacagctatgaacacacaacagaagaaaatccctgtccttgccaggcacggtggctcatgtctttgtaatcccagcactttgggaggctaaggcgggcagatcatgaggtcaggagttcgagaccagcctggccaacatggtgaaactccgtctctactaaaaatacaaaaattagccaggcgtggtggtgggcgcctgtaatcccagcttcttatgaggctgaggcaggacaatctcatgaacccaggaggcagaggttgaggtgagctgagatcacaccactgcactccagcctgggcgacagagcgagactccatctcaaaaaaaaaaaaaaagtggggttttaggtttgttctccccacctccagcaactgagcaactgaccggacagagctgccattcactgtggcaggaaagcctggcgggggcgctgttgaacatgaactgcctggtggacgtcctggtgggaatgggcattgggcatgagatcgtggaggtggggctctggagataccagcttgcagctgaccagtttgaggctggaggaactcaggggagcaagagtaggcaaagaggggagaggcctgggggcgggcccagtgtccagggagcttcaggtgctgactctgaggtcgcatccaagatccaggtgaaatgttcccgggaggttgggcaatcccctgcttaaccagtgaaccctggctcctgttccaaatttgtgttgactttctaggattaacccaacactaaaaacacctccacacataaaacacacctacacctcagcccatgaagagttaatatatgtgtgtgtgtgtgtgtgtgtgtgtgtgtgtgtatatatatatatatatatattttcttcttttcttttactttttttttttttttttttgagacaatcttgctccatcacccaggctggagtgcagtggcaggatctcggctcaccacaaccttgactacctgggctcaataaattctcctgcctcagcctcccgaggacctgagactacaggtgcccaccactacgcccagctgatttttgtattttttgtagagttgggggtctcactatgttgttcaggcaggtctcaaactcctgagctatagcggtctgcctgcctcggccacccaaagtgctcrgattacaggcgtaagccaccatgtcyggcctatcttttttcattcattgccaacatttcacaagrcagatttcacataaaccaccacatttcttgtttctcttagaaagttggtcaagttgggctgggcacggtggctcacgcctgtaatcccagcactttgggaggctgaggcgggcggatcccgaggtcaggagatcgagaccatcctggctaacacggtgaaaccccatctctactaaaaatacaaaaaaatagctgtgcgcggtggcgggtgcctgtagtcccagctactygggaggctgaggtgggagaatggcgtgaacccaggaggcggagcttgcagtgagccgagatcgcgccactgcactccagcctgggtgacagagcaagactccatctcaaaataaataaataaataaagttggtcaagttggtcaacaggacctgcggggcagggaggcagaaataacaagtggcttgtttgcctaaattctctgccacttcttacctgcaacgtcatgcaagttacgcaacatttctgctcctctgttttctcacctgtgaaatggggccaattgtgacagagttgttctgaggatttaatgagattagattaaatacccatgaaactcttatcaatatttatcatgctgcaatctcagcacttcgggaggctgaggtgggaaaatcacttgagctcaggagctcaagaccagcctgggcaacatagcaccagaccccatctcaaccaaaaataaacaaaattagccagatagggtggcacacatctgtagtcgcagctactcaagaggctgaggaggatcacttgagcccaggaggttgaggctgtagtgagctatgattgtgccgctgcattccagcctgggcaacagagtaagaacttgtctcaaacaaaacaaagcaagaataacttgctctacccgttgactcctgccccccaccaccacccagatcatacaatttttttttttttttttttttgcgacggagtctcgctctatcgcccaggctggagtgcagtggcaccatctcagctcatggcaacctccacctgctgggttcaagtgattctcctgcctcaccctcccaagtagctgggactacaggcacacgccaccacacctggctaatttttgtatttttagtagagatgaggtttcatcatgttggccaggctggtctggaactcctgacctcaagtgatccgcctgcctcggcctcccaaagtgctgggaggcgtgagccaccgcacccagcccagatcatacaattttatcagtaggaacttcatgcgtaccataccaccagtgtattagaatgcttttwatttttattttgacataatttaagacttacaaaatattcctagaatagtacagataattcatgtrtactgaaactccccattgttcttttcttttctttctttctttctttttttttttgtctttctttagagtcttgctctgtcgccaggctggcatgcagtgacacgatctcagytcactgcaatctctgcctcccgggttcaagctattctcctgcctcagcctcccgagtagctgggattacaggcacgcaccactacaccgggctaattttttttttagtagaggcagggtttcaccatgttggccaggatgatctcaatctcctgacctcgtgatccgcctgcttcagcctcccaaagtgctgggattacaggtgtgagccactgcgcccggccctttctttctttctctctttcttccttcctccctccctcccttttttctttccttctttcctcctttccttgtcttcccagctggtgagcagtggtgccatcacagctcactgcagccttgaactcttgggctcaagggatcctcccacctcatcctctcagcccgccgagtagctgggactacagatacatgccacagcacccgactaattttttttttttttagtttcagtagagaggaggtcttgctatgttgcccaggctgttcttgaactcctgagttcaaactgtcttcctgccttggcctcnnnnnnnnnnnnnnnnnnnnnnnnnnnnnnnnnnnnnnnnnnnnnnnnnnnnnnnnnnnnnnnnnnnnnnnnnnnnnnnnnnnnnnnnnnnnnnnnnnnnnnnnnnnnnnnnnnnnnnnnnnnnnnnnnnnnnnnnnnnnnnnnnnnnnnnnnnnnnnnnnnnnnnnnnnnnnnnnnnnnnnnnnnnnnnnnnnnnnnnnnnnnnnnnnnnnnnnnnnnnnnnnnnnnnnnnnnnnnnnnnnnnnnnnnnnnnnnnnnnnnnnnnnnnnnnnnnnnnnnnnnnnnnnnnnnnnnnnnnnnnnnnnnnnnnnnnnnnnnnnnnnnnnnnnnnnnnnnnnnnnnnnnnnnnnnnnnnnnnnnnnnnnnnnnnnnnnnnnnnnnnnnnnnnnnnnnnnnnnnnnnnnnnnnnnnnnnnnnnnnnnnnnnnnnnnnnnnnnnnnnnnnnnnnnnnnnnnnnnnnnnnnnnnnnnnnnnnnnnnnnnnnnnnnnnnnnnnnnnnnnnnnnnnnnnnnnnnnnnnnnnnnnnnnnnnnnnnnnnnnnnnnnnnnnnnnnnnnnnnnnnnnnnnnnnnnnnnnnnnnnnnnnnnnnnnnnnnnnnnnnnnnnnnnnnnnnnnnnnnnnnnnnnnnnnnnnnnnnnnnnnnnnnnnnnnnnnnnnnnnnnnnnnnnnnnnnnnnnnnnnnnnnnnnnnnnnnnnnnnnnnnnnnnnnnnnnnnnnnnnnnnnnnnnnnnnnnnnnnnnnnnnnnnnnnnnnnnnnnnnnnnnnnnnnnnnnnnnnnnnnnnnnnnnnnnnnnnnnnnnnnnnnnnnnnnnnnnnnnnnnnnnnnnnnnnnnnnnnnnnnnnnnnnnnnnnnnnnnnnnnnnnnnnnnnnnnnnnnnnnnnnnnnnnnnnnnnnnnnnnnnnnnnnnnnnnnnnnnnnnnnnnnnnnnnnnnnnnnnnnnnnnnnnnnnnnnnnnnnnnnnnnnnnnnnnnnnnnnnnnnnnnnnnnnnnnnnnnnnnnnnnnnnnnnnnnnnnnnnnnnnnnnnnnnnnnnnnnnnnnnnnnnnnnnnnnnnnnnnnnnnnnnnnnnnnnnnnnnnnnnnnnnnnnnnnnnnnnnnnnnnnnnnnnnnnnnnnnnnnnnnnnnnnnnnnnnnnnnnnnnnnnnnnnnnnnnnnnnnnnnnnnnnnnnnnnnnnnnnnnnnnnnnnnnnnnnnnnnnnnnnnnnnnnnnnnnnnnnnnnnnnnnnnnnnnnnnnnnnnnnnnnnnnnnnnnnnnnnnnnnnnnnnnnnnnnnnnnnnnnnnnnnnnnnnnnnnnnnnnnnnnnnnnnnnnnnnnnnnnnnnnnnnnnnnnnnnnnnnnnnnnnnnnnnnnnnnnnnnnnnnnnnnnnnnnnnnnnnnnnnnnnnnnnnnnnnnnnnnnnnnnnnnnnnnnnnnnnnnnnnnnnnnnnnnnnnnnnnnnnnnnnnnnnnnnnnnnnnnnnnnnnnnnnnnnnnnnnnnnnnnnnnnnnnnnnnnnnnnnnnnnnnnnnnnnnnnnnnnnnnnnnnnnnnnnnnnnnnnnnnnnnnnnnnnnnnnnnnnnnnnnnnnnnnnnnnnnnnnnnnnnnnnnnnnnnnnnnnnnnnnnnnnnnnnnnnnnnnnnnnnnnnnnnnnnnnnnnnnnnnnnnnnnnnnnnnnnnnnnnnnnnnnnnnnnnnnnnnnnnnnnnnnnnnnnnnnnnnnnnnnnnnnnnnnnnnnnnnnnnnnnnnnnnnnnnnnnnnnnnnnnnnnnnnnnnnnnnnnnnnnnnnnnnnnnnnnnnnnnnnnnnnnnnnnnnnnnnnnnnnnnnnnnnnnnnnnnnnnnnnnnnnnnnnnnnnnnnnnnnnnnnnnnnnnnnnnnnnnnnnnnnnnnnnnnnnnnnnnnnnnnnnnnnnnnnnnnnnnnnnnnnnnnnnnnnnnnnnnnnnnnnnnnnnnnnnnnnnnnnnnnnnnnnnnnnnnnnnnnnnnnnnnnnnnnnnnnnnnnnnnnnnnnnnnnnnnnnnnnnnnnnnnnnnnnnnnnnnnnnnnnnnnnnnnnnnnnnnnnnnnnnnnnnnnnnnnnnnnnnnnnnnnnnnnnnnnnnnnnnnnnnnnnnnnnnnnnnnnnnnnnnnnnnnnnnnnnnnnnnnnnnnnnnnnnnnnnnnnnnnnnnnnnnnnnnnnnnnnnnnnnnnnnnnnnnnnnnnnnnnnnnnnnnnnnnnnnnnnnnnnnnnnnnnnnnnnnnnnnnnnnnnnnnnnnnnnnnnnnnnnnnnnnnnnnnnnnnnnnnnnnnnnnnnnnnnnnnnnnnnnnnnnnnnnnnnnnnnnnnnnnnnnnnnnnnnnnnnnnnnnnnnnnnnnnnnnnnnnnnnnnnnnnnnnnnnnnnnnnnnnnnnnnnnnnnnnnnnnnnnnnnnnnnnnnnnnnnnnnnnnnnnnnnnnnnnnnnnnnnnnnnnnnnnnnnnnnnnnnnnnnnnnnnnnnnnnnnnnnnnnnnnnnnnnnnnnnnnnnnnnnnnnnnnnnnnnnnnnnnnnnnnnnnnnnnnnnnnnnnnnnnnnnnnnnnnnnnnnnnnnnnnnnnnnnnnnnnnnnnnnnnnnnnnnnnnnnnnnnnnnnnnnnnnnnnnnnnnnnnnnnnnnnnnnnnnnnnnnnnnnnnnnnnnnnnnnnnnnnnnnnnnnnnnnnnnnnnnnnnnnnnnnnnnnnnnnnnnnnnnnnnnnnnnnnnnnnnnnnnnnnnnnnnnnnnnnnnnnnnnnnnnnnnnnnnnnnnnnnnnnnnnnnnnnnnnnnnnnnnnnnnnnnnnnnnnnnnnnnnnnnnnnnnnnnnnnnnnnnnnnnnnnnnnnnnnnnnnnnnnnnnnnnnnnnnnnnnnnnnnnnnnnnnnnnnnnnnnnnnnnnnnnnnnnnnnnnnnnnnnnnnnnnnnnnnnnnnnnnnnnnnnnnnnnnnnnnnnnnnnnnnnnnnnnnnnnnnnnnnnnnnnnnnnnnnnnnnnnnnnnnnnnnnnnnnnnnnnnnnnnnnnnnnnnnnnnnnnnnnnnnnnnnnnnnnnnnnnnnnnnnnnnnnnnnnnnnnnnnnnnnnnnnnnnnnnnnnnnnnnnnnnnnnnnnnnnnnnnnnnnnnnnnnnnnnnnnnnnnnnnnnnnnnnnnnnnnnnnnnnnnnnnnnnnnnnnnnnnnnnnnnnnnnnnnnnnnnnnnnnnnnnnnnnnnnnnnnnnnnnnnnnnnnnnnnnnnnnnnnnnnnnnnnnnnnnnnnnnnnnnnnnnnnnnnnnnnnnnnnnnnnnnnnnnnnnnnnnnnnnnnnnnnnnnnnnnnnnnnnnnnnnnnnnnnnnnnnnnnnnnnnnnnnnnnnnnnnnnnnnnnnnnnnnnnnnnnnnnnnnnnnnnnnnnnnnnnnnnnnnnnnnnnnnnnnnnnnnnnnnnnnnnnnnnnnnnnnnnnnnnnnnnnnnnnnnnnnnnnnnnnnnnnnnnnnnnnnnnnnnnnnnnnnnnnnnnnnnnnnnnnnnnnnnnnnnnnnnnnnnnnnnnnnnnnnnnnnnnnnnnnnnnnnnnnnnnnnnnnnnnnnnnnnnnnnnnnnnnnnnnnnnnnnnnnnnnnnnnnnnnnnnnnnnnnnnnnnnnnnnnnnnnnnnnnnnnnnnnnnnnnnnnnnnnnnnnnnnnnnnnnnnnnnnnnnnnnnnnnnnnnnnnnnnnnnnnnnnnnnnnnnnnnnnnnnnnnnnnnnnnnnnnnnnnnnnnnnnnnnnnnnnnnnnnnnnnnnnnnnnnnnnnnnnnnnnnnnnnnnnnnnnnnnnnnnnnnnnnnnnnnnnnnnnnnnnnnnnnnnnnnnnnnnnnnnnnnnnnnnnnnnnnnnnnnnnnnnnnnnnnnnnnnnnnnnnnnnnnnnnnnnnnnnnnnnnnnnnnnnnnnnnnnnnnnnnnnnnnnnnnnnnnnnnnnnnnnnnnnnnnnnnnnnnnnnnnnnnnnnnnnnnnnnnnnnnnnnnnnnnnnnnnnnnnnnnnnnnnnnnnnnnnnnnnnnnnnnnnnnnnnnnnnnnnnnnnnnnnnnnnnnnnnnnnnnnnnnnnnnnnnnnnnnnnnnnnnnnnnnnnnnnnnnnnnnnnnnnnnnnnnnnnnnnnnnnnnnnnnnnnnnnnnnnnnnnnnnnnnnnnnnnnnnnnnnnnnnnnnnnnnnnnnnnnnnnnnnnnnnnnnnnnnnnnnnnnnnnnnnnnnnnnnnnnnnnnnnnnnnnnnnnnnnnnnnnnnnnnnnnnnnnnnnnnnnnnnnnnnnnnnnnnnnnnnnnnnnnnnnnnnnnnnnnnnnnnnnnnnnnnnnnnnnnnnnnnnnnnnnnnnnnnnnnnnnnnnnnnnnnnnnnnnnnnnnnnnnnnnnnnnnnnnnnnnnnnnnnnnnnnnnnnnnnnnnnnnnnnnnnnnnnnnnnnnnnnnnnnnnnnnnnnnnnnnnnnnnnnnnnnnnnnnnnnnnnnnnnnnnnnnnnnnnnnnnnnnnnnnnnnnnnnnnnnnnnnnnnnnnnnnnnnnnnnnnnnnnnnnnnnnnnnnnnnnnnnnnnnnnnnnnnnnnnnnnnnnnnnnnnnnnnnnnnnnnnnnnnnnnnnnnnnnnnnnnnnnnnnnnnnnnnnnnnnnnnnnnnnnnnnnnnnnnnnnnnnnnnnnnnnnnnnnnnnnnnnnnnnnnnnnnnnnnnnnnnnnnnnnnnnnnnnnnnnnnnnnnnnnnnnnnnnnnnnnnnnnnnnnnnnnnnnnnnnnnnnnnnnnnnnnnnnnnnnnnnnnnnnnnnnnnnnnnnnnnnnnnnnnnnnnnnnnnnnnnnnnnnnnnnnnnnnnnnnnnnnnnnnnnnnnnnnnnnnnnnnnnnnnnnnnnnnnnnnnnnnnnnnnnnnnnnnnnnnnnnnnnnnnnnnnnnnnnnnnnnnnnnnnnnnnnnnnnnnnnnnnnnnnnnnnnnnnnnnnnnnnnnnnnnnnnnnnnnnnnnnnnnnnnnnnnnnnnnnnnnnnnnnnnnnnnnnnnnnnnnnnnnnnnnnnnnnnnnnnnnnnnnnnnnnnnnnnnnnnnnnnnnnnnnnnnnnnnnnnnnnnnnnnnnnnnnnnnnnnnnnnnnnnnnnnnnnnnnnnnnnnnnnnnnnnnnnnnnnnnnnnnnnnnnnnnnnnnnnnnnnnnnnnnnnnnnnnnnnnnnnnnnnnnnnnnnnnnnnnnnnnnnnnnnnnnnnnnnnnnnnnnnnnnnnnnnnnnnnnnnnnnnnnnnnnnnnnnnnnnnnnnnnnnnnnnnnnnnnnnnnnnnnnnnnnnnnnnnnnnnnnnnnnnnnnnnnnnnnnnnnnnnnnnnnnnnnnnnnnnnnnnnnnnnnnnnnnnnnnnnnnnnnnnnnnnnnnnnnnnnnnnnnnnnnnnnnnnnnnnnnnnnnnnnnnnnnnnnnnnnnnnnnnnnnnnnnnnnnnnnnnnnnnnnnnnnnnnnnnnnnnnnnnnnnnnnnnnnnnnnnnnnnnnnnnnnnnnnnnnnnnnnnnnnnnnnnnnnnnnnnnnnnnnnnnnnnnnnnnnnnnnnnnnnnnnnnnnnnnnnnnnnnnnnnnnnnnnnnnnnnnnnnnnnnnnnnnnnnnnnnnnnnnnnnnnnnnnnnnnnnnnnnnnnnnnnnnnnnnnnnnnnnnnnnnnnnnnnnnnnnnnnnnnnnnnnnnnnnnnnnnnnnnnnnnnnnnnnnnnnnnnnnnnnnnnnnnnnnnnnnnnnnnnnnnnnnnnnnnnnnnnnnnnnnnnnnnnnnnnnnnnnnnnnnnnnnnnnnnnnnnnnnnnnnnnnnnnnnnnnnnnnnnnnnnnnnnnnnnnnnnnnnnnnnnnnnnnnnnnnnnnnnnnnnnnnnnnnnnnnnnnnnnnnnnnnnnnnnnnnnnnnnnnnnnnnnnnnnnnnnnnnnnnnnnnnnnnnnnnnnnnnnnnnnnnnnnnnnnnnnnnnnnnnnnnnnnnnnnnnnnnnnnnnnnnnnnnnnnnnnnnnnnnnnnnnnnnnnnnnnnnnnnnnnnnnnnnnnnnnnnnnnnnnnnnnnnnnnnnnnnnnnnnnnnnnnnnnnnnnnnnnnnnnnnnnnnnnnnnnnnnnnnnnnnnnnnnnnnnnnnnnnnnnnnnnnnnnnnnnnnnnnnnnnnnnnnnnnnnnnnnnnnnnnnnnnnnnnnnnnnnnnnnnnnnnnnnnnnnnnnnnnnnnnnnnnnnnnnnnnnnnnnnnnnnnnnnnnnnnnnnnnnnnnnnnnnnnnnnnnnnnnnnnnnnnnnnnnnnnnnnnnnnnnnnnnnnnnnnnnnnnnnnnnnnnnnnnnnnnnnnnnnnnnnnnnnnnnnnnnnnnnnnnnnnnnnnnnnnnnnnnnnnnnnnnnnnnnnnnnnnnnnnnnnnnnnnnnnnnnnnnnnnnnnnnnnnnnnnnnnnnnnnnnnnnnnnnnnnnnnnnnnnnnnnnnnnnnnnnnnnnnnnnnnnnnnnnnnnnnnnnnnnnnnnnnnnnnnnnnnnnnnnnnnnnnnnnnnnnnnnnnnnnnnnnnnnnnnnnnnnnnnnnnnnnnnnnnnnnnnnnnnnnnnnnnnnnnnnnnnnnnnnnnnnnnnnnnnnnnnnnnnnnnnnnnnnnnnnnnnnnnnnnnnnnnnnnnnnnnnnnnnnnnnnnnnnnnnnnnnnnnnnnnnnnnnnnnnnnnnnnnnnnnnnnnnnnnnnnnnnnnnnnnnnnnnnnnnnnnnnnnnnnnnnnnnnnnnnnnnnnnnnnnnnnnnnnnnnnnnnnnnnnnnnnnnnnnnnnnnnnnnnnnnnnnnnnnnnnnnnnnnnnnnnnnnnnnnnnnnnnnnnnnnnnnnnnnnnnnnnnnnnnnnnnnnnnnnnnnnnnnnnnnnnnnnnnnnnnnnnnnnnnnnnnnnnnnnnnnnnnnnnnnnnnnnnnnnnnnnnnnnnnnnnnnnnnnnnnnnnnnnnnnnnnnnnnnnnnnnnnnnnnnnnnnnnnnnnnnnnnnnnnnnnnnnnnnnnnnnnnnnnnnnnnnnnnnnnnnnnnnnnnnnnnnnnnnnnnnnnnnnnnnnnnnnnnnnnnnnnnnnnnnnnnnnnnnnnnnnnnnnnnnnnnnnnnnnnnnnnnnnnnnnnnnnnnnnnnnnnnnnnnnnnnnnnnnnnnnnnnnnnnnnnnnnnnnnnnnnnnnnnnnnnnnnnnnnnnnnnnnnnnnnnnnnnnnnnnnnnnnnnnnnnnnnnnnnnnnnnnnnnnnnnnnnnnnnnnnnnnnnnnnnnnnnnnnnnnnnnnnnnnnnnnnnnnnnnnnnnnnnnnnnnnnnnnnnnnnnnnnnnnnnnnnnnnnnnnnnnnnnnnnnnnnnnnnnnnnnnnnnnnnnnnnnnnnnnnnnnnnnnnnnnnnnnnnnnnnnnnnnnnnnnnnnnnnnnnnnnnnnnnnnnnnnnnnnnnnnnnnnnnnnnnnnnnnnnnnnnnnnnnnnnnnnnnnnnnnnnnnnnnnnnnnnnnnnnnnnnnnnnnnnnnnnnnnnnnnnnnnnnnnnnnnnnnnnnnnnnnnnnnnnnnnnnnnnnnnnnnnnnnnnnnnnnnnnnnnnnnnnnnnnnnnnnnnnnnnnnnnnnnnnnnnnnnnnnnnnnnnnnnnnnnnnnnnnnnnnnnnnnnnnnnnnnnnnnnnnnnnnnnnnnnnnnnnnnnnnnnnnnnnnnnnnnnnnnnnnnnnnnnnnnnnnnnnnnnnnnnnnnnnnnnnnnnnnnnnnnnnnnnnnnnnnnnnnnnnnnnnnnnnnnnnnnnnnnnnnnnnnnnnnnnnnnnnnnnnnnnnnnnnnnnnnnnnnnnnnnnnnnnnnnnnnnnnnnnnnnnnnnnnnnnnnnnnnnnnnnnnnnnnnnnnnnnnnnnnnnnnnnnnnnnnnnnnnnnnnnnnnnnnnnnnnnnnnnnnnnnnnnnnnnnnnnnnnnnnnnnnnnnnnnnnnnnnnnnnnnnnnnnnnnnnnnnnnnnnnnnnnnnnnnnnnnnnnnnnnnnnnnnnnnnnnnnnnnnnnnnnnnnnnnnnnnnnnnnnnnnnnnnnnnnnnnnnnnnnnnnnnnnnnnnnnnnnnnnnnnnnnnnnnnnnnnnnnnnnnnnnnnnnnnnnnnnnnnnnnnnnnnnnnnnnnnnnnnnnnnnnnnnnnnnnnnnnnnnnnnnnnnnnnnnnnnnnnnnnnnnnnnnnnnnnnnnnnnnnnnnnnnnnnnnnnnnnnnnnnnnnnnnnnnnnnnnnnnnnnnnnnnnnnnnnnnnnnnnnnnnnnnnnnnnnnnnnnnnnnnnnnnnnnnnnnnnnnnnnnnnnnnnnnnnnnnnnnnnnnnnnnnnnnnnnnnnnnnnnnnnnnnnnnnnnnnnnnnnnnnnnnnnnnnnnnnnnnnnnnnnnnnnnnnnnnnnnnnnnnnnnnnnnnnnnnnnnnnnnnnnnnnnnnnnnnnnnnnnnnnnnnnnnnnnnnnnnnnnnnnnnnnnnnnnnnnnnnnnnnnnnnnnnnnnnnnnnnnnnnnnnnnnnnnnnnnnnnnnnnnnnnnnnnnnnnnnnnnnnnnnnnnnnnnnnnnnnnnnnnnnnnnnnnnnnnnnnnnnnnnnnnnnnnnnnnnnnnnnnnnnnnnnnnnnnnnnnnnnnnnnnnnnnnnnnnnnnnnnnnnnnnnnnnnnnnnnnnnnnnnnnnnnnnnnnnnnnnnnnnnnnnnnnnnnnnnnnnnnnnnnnnnnnnnnnnnnnnnnnnnnnnnnnnnnnnnnnnnnnnnnnnnnnnnnnnnnnnnnnnnnnnnnnnnnnnnnnnnnnnnnnnnnnnnnnnnnnnnnnnnnnnnnnnnnnnnnnnnnnnnnnnnnnnnnnnnnnnnnnnnnnnnnnnnnnnnnnnnnnnnnnnnnnnnnnnnnnnnnnnnnnnnnnnnnnnnnnnnnnnnnnnnnnnnnnnnnnnnnnnnnnnnnnnnnnnnnnnnnnnnnnnnnnnnnnnnnnnnnnnnnnnnnnnnnnnnnnnnnnnnnnnnnnnnnnnnnnnnnnnnnnnnnnnnnnnnnnnnnnnnnnnnnnnnnnnnnnnnnnnnnnnnnnnnnnaatgtcatcaacatctccagcctggtgggggcaatcggccaggcccaggcagttccctatgtggccaccaaggtatggcagcccctaccccttccttccctccctactccttcccatgggccttggctttgagtccagacaacttaggagccagacctagcaagatcttggccctagaaagtctcacacctaactccyagatgcagcacccaggcataactgcctgtgacagatttctgttttttcttttcttttctttttttttttttaaagatggagtctcgctctgtcaccaggctggagttcagtggtgcaatctcagctgcaacctctgcctcctgggttcaagggattctcctgactcagcctcccgagtagctgggactacaggcgcatgccaccgcacccagctaattttttttgtattttttagtagagayggggtttcaccatgttagccaggatggtctcgatcttctgacttyatgatctgcctgccttggcctcccaaagtgctgggattacaggcatgagccaccgyacccagcagatttctgttttttcttttctttctttctttttttttgagatggagtttcgctcttattgcccaggttggagtgcaatggtgtgatcttggctcactgcaacctccgcctcccgggttcaagtgattctcctgcctcagcctcccaagtagctgagattacaggtggctgtcaccacgcccagctagatttttgtattttttagtagagacgagatttcaccatgttggtcaggctggtctcgaactcccgacctcaggtgatccacccacctcggcctcccaaagtgctgggattacaggcatgagccactgtgcccggctaactttctttttttcttttcttttcttttcttctttttttttttagatagggtctcactctgtcacccaggttgcagtgtggtggcatgatctcagctcactgcaacccctgcctcatgggttcaagcgattctcacgcctcagcctccccagtagctgggattacaggcgtgcaccaccatgtccggttaatttttgtatttttagcagagatggggttttgccatgttggccaggctggtctcgaactcctggcccaagtgatccacccatcccggcctcccaaagtgctgggattayaggtgtgagccactgcacctggccttcctgtgacagatttctatgccaagtttctcccaagaaaccaagcctggtgcctctgaaggcagccttcaaggagggcatgacttccccattctgatgcccccctggctggcaggagacaatggatggcagggaccccatgtcccggggactgaactttcttccccgctccatttcctgcagggggcagtaacagccatgaccaaagctttggccctggatgaaagtccatatggtgtccgagtcaactggtgagctgctctgagcaggcggagagcctcctggggggactggggtgactgggagtgatcccaagtggttcgagacagattgctttgatcccccctctcccttcctctagtatctccccaggaaacatctggaccccgctgtgggaggagctggcagccttaatgccagaccctagggccacaatccgagagggcatgctggcccaggtagaagtggggttcagatccaggtggtagaaggtggcatgggggtggggggcatggcgatcaagtggggctcctcttgacctccttcccccctcttttctccccagccactgggccgcatgggccagcccgctgaggtcggggctgcggcagtgttcctggcctccgaagccaacttctgcacgggcattgaactgctcgtgacggggggtgcagagctggggtacgggtgcaaggccagtcggagcacccccgtggacgcccccgatatcccttcctgatttytctcatttytacttggggcccccttcctaggactctcccaccccaaactccaacctgtatcagatgcagcccccaagcccttagactytaagcccagttagcaaggtgccgggtcaccctgcaggttcccataaaaacgatttgcagccagaaggaggaggatatcgttattatttatttcccatcctttagacgagtccttctgccccacttagcccttgcaccccagacccacaagttgcctcgaccctgaaggactgcagctccccccgccccccaaccccaggccttgcagcaagcaggtgcctgatgttgctagccctgtcgctgtcgccaggggctcctgggaagggtagagcggtttggcttcaccagcgcgctaactaaaggcccgcaggggagagtaaattaagcgctaattaggaggtaatggagggggagacgcagaaggccctcttactcttggccctcagggaaaaggagttttcctctcactgcctgtagaataggaaggtggctggcaagaaaagtccaaagggaagagaaagtagggggttgagacatctggatcagagggaggaggggctgaaactcctgggttttggtccgcagggcactgggggacgcagactccccagctggacccagggggggggcagggcccgggtgcgctggcgtcccccaggtgaggggtggagctgcagggctgctgcggattggctgtggccgggggggcgtgtgcaccaaccgctgattggccgcggcgggggcgggagctgtcagtgggccccgaccctacagcccggggctggcgggtggggcaggaggactggggcggagcgcagaaaaacagggcgacgccctgtgagggaagggtcccgcggtttggctgtttgggcctgtggctgttaggggtggcaggatagtgacccggggacaggacttgggggcactgtgggggtagaatttggagacagagtgtcccagggtaggattgccgagacacgatggccgagggatacgattttttttttttttttttaatttgagacggagtctcactctgtcgcccaggctggagtgctgtggtgcaatgtcggctcactgcaacctccgcctcccgggttcaagcgattctcctgcctcagcctcccgaatagctgggattacaggcccccggcaccacgctcgactaatttttgtatttttatgtatttatttttatttatttatttattttgagacggagtctcaccctgtcacccaggctggaaatgcagtggcgcgatctcggctcaccgcaacgtccgcctccagggttcaaatgattctcctgcctcagcctccctagtagctgggattacaggcgcacaccaccacacccggctaatttttgtatctttagtagagacggggtttcaccatgttggtcaggcgggtcttgaactcctgaccttgtgatccgcccacctcggcctcccaaagtgctgggattacaggcgtaagccaccgtgcctggccttaatttttgtatttttagtagagacggggtttccccatgtcggccaggctggtcttgaactcctggcctcaggtgatccacccgccttggcccccaaagtgctgggattacaggtgtgagccaccaagccaggactttttttttttttttttttttttttttgagacggagtctcactctgtcgcccaggctggagtgcagtggcatcatctcggctcactgcaacctctgcctccccgattcaagcaattctcctgcctcagctttccgagtagctaagattacaggcgcccgccaccacgcccggctaattttttgtatttttagtagagacggggtttcatcatgttggaccaggctggtctctaactcctgacctcaggtaatccgcccgcttcggcctcccaaagtgctaagattacagacctgagccacttcgcctggcagggaccgtatttcaagtcctgccctcccaccagcgcctgcgccccgcagcagtgtccggctccctgccgacgccctggagctgggacggcctggggcgctggtcggccgccttcccccagaaggaggcgtgagcggggcgtggccggaacgtctctcttcggagccgcgccccgggcgggcacagttacgcgccgcacggatcatggccgcagccgctctggggcaggtgggttcgcagccccgcgccggggtctgggaaataaccgggggaggcgcacttccgggaagaccactggcctgcagccggtccgactcggcgccgctcctcccgccctggggttccgctgcagggcgcggaggaggatggcgccctttggaaaggagcacgaggctttaatggggtgagggggagcaggtagacgcggatgaggtggggcaagtaattggcggggaggtaaaaaaaaaaaaaaaaagggaaacatggtggaggaccctgtaatgagggaggcgtgggggtggggaggttgtgatttggggagcggagccctggggtgcggtggggcatcagcctgtgcgggagctggaataaaggggcccagacctccagggccgggtgcaggtgaaggcagagttggacctcaagtctcagctctgggaattggactcaaggtcctattttcttggaatgaaagttgaaaaaaataagagatggggattgctgtgcttcccaaactcctatctgaagctttgcacctggattggaaatcgaggcagcgtctcatggtcaaagtgacagatgctgcaggctggctgagacgatcccttctgactgtgcgatgtcaaacagcagcagcgtttcccagagtctatgatttcagagaacaaggtttctcagtgaggaaggaaacagccaaagaaaggggtcattacaagccttcacagctgcggtgtaaccttgggagaactgtctgttaactttacacctgactttatttgagtctcttatcctagctgatgaatgtcagggcagaatttcacttttttcggctcttagtgactgatagggatagtcctgggatacctggggtatgtgggcaatctgggctttagtggtgacactcctggactgtggtggggcagtactgggctttgacaggtccacttgggactgatgtggaccgtctcatcatggcacagttctggtgtcatagaatggccctgaactcatgatgggacattcctaggctctgatgaagatagagatatcctgtaatggagataattgggctgagtcctcagctgtgatggggacagtcccggggtgtggagaggacagtgctggaccatggtagggacagtctggaaggtactggcctagacagcaacatagggatagtcctggggattgaaaaagacaacaatgggatttttttttttttttaaatttcagacctggtgaataggaaataagccctgatatttggcagagacaatgctggttataatggggaaaagtgctgggctttggataggggacattcctgagctgtttgggacagtacttggctctgctggggaccagttctgataagttacaggcacaatctggacttgtgatgtggagcatcttgggccatcatagaacagccctggtctgtgatgggggagagtcctgggctataaagggggcagttctagacgtgatggggtcatgtgtgggctgtgacaagggcagactgcggtatgatggggtctctccggggccgtgatatggggacagtcctggagtatggagggcactgctgggctttgacagtgacactcctggtctttgatggtgatactcctgggctgtatgggacataatggaggttctatcacattatagagacctgccctgtgaacccccaaacgtactttatttctttgtctcgtcttttctttttgaccgagtcttgctctgttgctcaggctggagtgccgtggcacgatctcggctcactgtaacctccgcctcatgggttcaagtgactgtggtgcctcagcctcccgagtagatgggctcaagcgatccacctgcctcagattacaggcatgagccaccatgctggtctttttttttttttttttttttttttttttttgagagacactctatcactcatgctggagtgtagcagtgtgatcgtagctcaccacagccttgaccagtaggtcaaggtgatcctcccaccttagccttctgagtaactggaattacaggtgtgtgccaccatacctggctaatttttaaattgtttgtagagacagggtcttgctatattgcccaggctgatcttgaactcctggcctcatgcagtcctcccacctctgtctcctaaagtgctgtgattacaggcatgagctactgagccagctgcctactttctttctttgttttttttctttttaattgagacagagagtcttgctctgtcgcccaggctggagtgcagtggcaccatctcggctcactgcaacctccgcctcctgggtttaagcaattctcctgcctcagcttcccaagttgctgggactacaggcgcccgccaccacacccagctaacttgtattttctgtagagacagggtctccctatgttgcccaggctggtcttgaacacctggcctcaagctatcctcctgcctcggcctcccacagtgctgggattacaggcgcgagccactgcgtgtggcctctttctatgattagatctattttggcatctcttgtttcttggcgtcaatttctgtttttgtttttttttttttctgtttgtgcgcccctttctgtgtttctttttctcatccttcctcttccatctcttactctctttttttcatcttggctctgagggcagctctcctgcccacaggctggctgtcgcactgtgtttgtgtctctcatactgtgggtgtcctatccctctgggcagaagcatggctgcaaggctgagcagtctagatgtcgccacccaaaggcaatctggggacccacgctctgatcaccccggaatccctggagcctcacaccagcaagaccacgctgcaggcccatctcccagcaactcacctagcgacaagtgaccacgcccattcacgtccatcttccagaatcagtgccaactcacccagctcacagggcaggccaggccaggccactctgtctctctcaacctcacgccccaacgcctccccacagggctggggaaagaggccttgtgaggtcaaaggtcaccagagagggcccagcctgctggacacagccagacctgctcttcctactcccctctgggaggacccgcctgagcctcatgcagtgaggactgcagtggctccccaggcccctgtagctgcccctcagccccaggggctgaagggaattggagtcactgccaaaatgggtttgtatttcaggtaatcagagcccagttgatcgaataccttcagagaataagcacctgtactcctgggtctggcggaggaggggctggggaactggactcctgggtctgagggaggaggggtggggcctgtactcctggatgtaagggaggagggtctgaggcctggactccagggtctgagggaggaggggctgggggcccagacttcgggtctgagggaggaggcagctagagtctggactcttacttaggtctgagggaggcgggcctggggtctgcacccctgagctctgggggagcaggacctgtcggtccttggtcttctaaggcctgtcagcacttgggtacccggaggccttcacttacctgtgtgccttccctggttgttttcttgtctgagctgatttccaggctgcgaccaaaggtctctggggtgggaggcgcttgcgtttgactttgccgcagcatggaggagggggcgggagctgactcagctctttccagcgagccctcgtcagggcagggaggggacttggcctccttcaggaccacctgccccgtctagaatggactgaaactgggacagaacaggcaggccagtgggacctccaagtgcaggaggtggcgagcgagctgccagggcccctgctgtgccccactcaccccctctctcacttctttctccacccagatctgggcacgaaagcttctctctgtcccttggcttctgtgtggtcccag

SEQ ID NO: 94477 - DNA, 20537 bp, Homo sapiens
tagcagccaggccacaccccctagctcaggctccgccccattggaatgtaggccccgcccccggcgggtaccaagcttgtttagtttcagggctcccgccccgggcagccaggaggcccagtgagcagtgtaccgatgccagggtgcatctgtgcctgtagcggcccatactccacctgctccccgtccactgtgagcacgccgcgtggtgtgagcggctctaggcggaaggcacgggccgcggcgtagcccagctgcggacagcccaggctgaagtggctaccacgctccatggccaagaaaaggcgcagcagcgcagcccgcgagatgccgctacgcacccagcacaggtgcaccaggccgtcgtcgaagcgcgcatgcggagctgccaccaggtcagcgcctaggtggctgggcgagatggccaacatgagcacaaagtccccctccagcgtcacccagtctgggggcagcggggtgcccagcggaggcagcaggtggtcgggcgggccgcaggtggaggcccctacccgggcatcaggggtgggaagtgggagcccagaggatgggggaattacgggggccccttcggagacgggtgagtgtagagctgccttgggagagccaggaggtgaagacagcagtgggtccggggacagcggagcatccccagccccaccccagtccccagccagctctgggcccccaccgttgagggacaggatgggcaggggttctggcgagccaggagaggccagggcaggctggggcaggggaagaggcaggtcagacacagaacgatgcaggggtgagtgggccatgggcggggctgggtctggggttagggtcagctccgacttggcacgaggcaggctatgggcaggggtgggcgaggcaggttccacagtggcggggaggtaggagaggcgtccgcggtaggtgtgcagtgtggcgaggcccagcaccgtgcccagtgtgaagcgggcactgcccaaggccctgaagcgctcgctctggatatccacatctgacacgaagccccaggccacagacaggaaggagaaacagcgggagcccgaggccagcgtcacggagagcaggtccagtgggtggccaccaccccggcacagcaacagtgagcagttgagcaacaggtcgaggcccagggctggctcaaatcttcacagccggagatggacggacacacagaaggaaggagcaaacaggggttggggaaagagacaggtaggaaagcagctggcaatgagaccacgaaggccatggcccaggcccaccacagccgtggggccacctccaggcgactccttacggggccaggttcctggtcatctctttcatttgctccctacaattcactgagtgcctcccatgccaggcagagttctgggcgctcgggatacagctgggaagcaggcaggcaaaaatgtccaggagctgggggtgagcatcccacaggcaggctgatttacttgactgactgtgggtttggctgagtgggagatataggggtccctatcaccccaggaggggctcatccctcccttcgtggtatcctcaacctaccccccgtgctggttcactgctccggccagcgcgttgcccgagccgcaggggaggatgcccacaggcatcttcacagcttcctcccagtcagggcgatctaggagcccgttcagcacctggagggtgggagaccagaagcctgggtcctggtggcagtctctatagtcccccagggcccagggctaggggcagggtgctcctgctctacctcatggagcagcccgtctcccgagaccgtgacgatgccatcccactcactcaggctcagcccctggaccagctcccgggcgtggttctgtcgttctgaagtgggataccgggctgttaggcaggctgtcccaccccagccccatagacccaggagtcccacccaccactttgctcccttaggactcagctgtcccagcccccagctcccattctcactggcccttacctgtctggatgaggttgaaggacagcccagcttcagagatcatgggaagcacgtggttcttacaccactgccaggccaggccccgacccccaaagggattgaccaatagaagcaaccggggcggccgaggtagcaggtcaggggtgatctctgtggagagaggttagggtctgcagaggccagtgacccaggccccccaccttggaaacagtcccttcatcagcccccaacggaattggtggagggctggcccctgggacctgctggctctcatgtggccaggcctaggtatgcagccctgccccaactcctagctgctgagacaaaggcagggcttaggtgtgaaaccaaatgccctttgtccccatgtgtgggaggagctgtagttcagagctgtggttcccactttcctcaccccaaacacctattacccaggattaggttacttccagcccttaggggccccaggcaggattagatgccacctctgaactccagggaagccctagacctctgttggcacccatcactctgggtggtacctggtcctgtctcaggctgctgctctcaccaccctgggtgactcacctgtggtcaagacccatgcaaaggggaagaggataggagacagaaacataaatctagcaagagaacagcagatgtaaatcacttttctctgcctgcgtttttgttttgttttgctttttgtgatggagtatcggtcttgtcgcccaggatggagtgcaatggtgcaatctcggctcactgcagcctctgcctcccgggttcaagtgattctcctgcctcagcctcccgagtagctggaattacaggcatccgtcaccatgcccggctaatttttgtatttttaatagagacagggtttcgccatgttggccaggctggtctcgaactcccgacctcaggtgatctgcctgccttggcttcccaaagtgctgggattataggcatgagccactgcacgcgacctctgcctgtgcttttttttttttttttttttttttgagacagagttttgctcttgttgcccaagctggagtgcaatggcacgatctcagctcactgcaacctctgcctcctgggttcaagcgattctcctgcctcaccctcctgtagctgggattacaggtgcgcagcaccacacccggctaattttttgtatttttagtagacatggggtttcaccatgttagccaggctggtctcgaactcctgacctcaggtgatccacccgcctcagcctcccaaattgctaggattacagacatgagccaccacatccggtcctcttgtctttttgttccttctgtagcccatccctgtgtatcactcctaacggatccagagagatacatcacccagacacacagaaaaataaagacacagctgcctatggaggaaattctgcagagacaccaaggtggctccaggatagagcagctgcccagcacctcacccccatccccgggcagtggcagtcctcggagcagacaggtgagggcagtggcccagcgctgggcctcggcacggttctcttcgtaggtggcggccccatctgcccggaaggtgcgagtggctctgcgccgggccccgcgccggccccgagggtaggtgtagatgcagaagtaggccgctgagtctgaggggctgcggcttcgcagggtgcagcagcctgagacctcggccaacgggaccaggccaccccggggcctggcttcaggtttggggcgcagccgctgtatgtgcagggcctgcgatgtaagggtgagggcaaagcgtgggcctcgggctgggtaggagccaaactcgccatggaggagcggggtgctggcagccagtggcggtgggggcggggccatggccttagccctgaccagggtgctcctaggcccgtggccccagctcccggtcagctcctggtctggcctctgtgggaagggaggagagaaggggtgagaattcaggaccccatggcaggggcagggaggggcaggggctgtggacaggaggagacaatgaggggcagtggcaggtgagacaggagcatcagagacagacaggctcagacaggtgtgggcagaccttgaggatgcgggacagaggccagcatcccagagggggccggagacccgggcatgcaaacatccaatcatttattccccagtaagtattcagtaccctttatgtgccaatcacggtgctaggcctagcaaacacagcaggagacaaaatagccccaaatccttgccttcataggaatagataaacaagagaaaggattgaaatatacaggtggttgggtgatgataacgggctttgggggaaaagaaggcacaggaaggggaatggatagtgggattggatatgcagaaacagacatgcaaagactgaaagacacacctccccgacacccccaccccccatacggtgcagtgggtaaaacagcaaaacaatcacaaacgcaatagagatagggtctgagagccagagaaacactgagaggagacaaacagggtcaatgaggtgaaactcaggcgatgaaagatacttaagagagtaagactttttcaccccaacgagaaaggcaagacagagtggaagggagagcaaataggaggggtacgaggcaggcatggagacagctggagagaagggatatgacagggactacggggtccgagaggagccacatgcgagcgcctgcaaggggcaggggccaagagctggtccctgagcactgacctgggtgtctggccgcctgctctccagggagcgggtgggagcaggactgaggtcccttccccacaggccctctccctgccctctgcccggattctgcctcctcctttcgctcacctttgttccccactgccccgcccagccacctgccagtcctgcccctcacattccccaggcccagagcgccaggacagccccccaccccccaccgcctgtggactcacccttaggaactacatctgcccccctatccccagcggctctctcgggtccaggacgtctgcttcacccccaaacctgccctggccccattatgggaacctcaaatcaggttcaagcacagagccctagatgtcctccagtcttgggcctgggtctctgtccctgggtccccgagacctggacctgggtctccatccattggtccccaatccataggcctgcgtgtctggccctgggcccccaaaccgccatccgcactcttatttccagaacccagtcccaggcctggctgggttcagtcctggcccaggttttccatttccatctcccaccccggtgccccagtcccgggcctgagtctctgttcctcttggtccctcagtcccctagactccggtccctgccccgacccccgcaccctcctcacacgccgggtcctcctccaggcggtcccgcaagtcagcaccaacagcccccatcagacctaggggtggggggagggtgtgcatccgctcagccaatggccgtgcagccggcctgggccgcaccaatacgagggcgcggggggtggagccagtcagctcgcgagcttggtgcagggaccggccgcgggagaggccgagagctgggcggggcctcgcgcttcgggagactggccgccatcgtgggtgagggccgacgcgcagcggagacgacgtcgcggccccatagacagcgccgttgtcgccatctttgttaagggagagtgggcctgtctcatccattgaattcacaaaagaaaaggggcgtgagggaggaggtctttagctgcaaagacagagactctaacacgcgtaacaaaggcccagagatccgatccagacacagagcaaggcagagacccacagaggttggatgaggcaataagagagctgggaggagagggagagtggggaaagtgaaggatacttttttttcggacagttacagagtcagagagacccagagaaaagcagagatataaacaagagaccaaaacagtgggattgagaatgtgcaaggtaaggatacaagaaaaccctgaaaatgacagacacggagacagatggagacagacacttctggaatggaagccgcgaaggagaggctcattaattcagacttatttatctcaggctcaaaccagaatggaagcggcatgagataaacatctgcccagtgaatgaaccagtcacatggcaagacagagacagagagatggggacagtatctctaggtcaaaggtgagggagggagagaatattggaagcccaggggctgggaggaactgggacagaaagtgaagatgttgacagatgcaccgaggcaaagacatggtgaaattgaaagaaaggcaagtatatattaggagacttagaaacagaattgcatagagagaaagagatatgcattaggagacaaggacagagctcactagaaagtgacaaatgtaggctgtaggccaggcgtggtggcttacgcctgtaatcccagcactctgggaggccgmggcgggtggatcgccaggtcaggagtccgagaccagcctgaccaacatggagaaacccccgtctctctctcttttttttttttttttttttgagatggagtctggctctgtcacccaggctggagtgcagcggcacgatctaggctcactgaaccgcctgcctggttcaagcgattctcctgcctcagcctcctgagtagctgggactagaggcacgtgccaccacgtccggctaattttttacatttttagtagagacagggtttcaccgtgttagccaggatagtctggatctcctgacctcgtgatccatccgcctcagcctcccaaagtgctgggattacaggcgtgagccacctcactggtccaaaacccccatctctactaaaaatacaaaaattagccaggtgtggtagcacgcacctgtaatcccagctactcaggaggctgaggcaggagatcgcttgaacccaagaggcggaggttacagtgagccgagatgatgccactgcactccagcctgggcaacagaccaagactctgtctcaaaaaaaaaaaaaaaaaaaaaaaaaagasagacaaatgtaggaagaagtttgcttattgccaaatcatgtacctagcatccaacccacagtagcaacagcaccagatagtatgtgccaaggaatgacacggagagaagggggaacagaaacccagtaagactgagactggggcacagcaactgagcttggggccctgggagaaggaaaggcagagacactgggcaaagaagctgagattcaaacatagagcctaagtcacacagacgagaggacagggaggaggaaaaggagaaaggaccctgcagctcacacacacttgctgtgtgactgctgggaagcccctgaattcttggcctcagctgtcctgtctgggaagtagggagaaagctattcacactgaaacaggaattaaaagaaattaaagaatgtgtaagcaaaaactcagttgtatgtaaaaaacccaattccccctgaggaagagaaagagattgagtcctttatttttttttattttttttttttttgagacggagtttcgctctgtcgcccaggctggagtgcagtggcgcgatctcgactcactgcaagctccgcctcccgggttcacgccattctcctgcctcagcctcccgtgtgtagctgggactacaggcgcgcgccaccatgcccggctaattttttttgtatttttagtagagacggggtttcaccgtgttagccaggatggtctcgatctcctgacctcgtgatccgcccatctcggcctcccaaagtgctgggattacaggcgygagccactgcgcccggcccgagattgagtcctttaaaaattaactgcctgtttttctgtttgtggctagtgagccttatctaactccctttcccaggcatcgtgaagaccctgtttctctaactgtgcagctgcaaggtcactagacaggataaactcaagtcctaaaacatgtttttccttgaaaagtaagaaataatgtaatgcatgtctcaattgaataactgtctttgtttctcgctgctataatatgcttccscctgcacagatctccccctaccccacgaaatacttaaaatgtaacttgactctttgttcggtgctcagtctttttcgatgttaatctgactgggccagtgcacctaaataataaataataagtatcctcctcaacccctcagtttctctgattcctaaattatcccactggaacacctgcctggagagaaggtctgaaatcacttatggaagggctcccaggctgggcgcggtggctcatgcctgtaagctcaacactttgagagactgaggtgggagaatcccttgagctcaggagttcaagaccagcctgggcaacagagggagacctagtctctagaaaaaataaaaaaattggccgggtgcagtggctcatgcctgtaatcccagcactttgggaggccgaggccggcgtatcacctgaggtcgggagtttgagaccagcctgaccaacatggagaaacctcatctctatgaaaaatacaaaagtagctgggtgtggtggcgcatgcctgtaatcccagctacttgggaggttgaggcaggagaactgcttgaacccgggaggcggaggttgcagtgagccaagatcgtgccattgcactccagcctgggcaacaagagcgaaactccacctcaaaataaataaataaataaaaataaaaaaattagccagccatggtggaggctacttgggaagctgaggtgggaagatcactttagcccaggaggttgcagctgcagtaggctgtgattgtgccactgctttccagcctgggcaagagtgagaccctgttttttcttttttttttttgagacggagtctcactctgtcacccaggctggagtgcagcgcgatctcggctcactgcaacctctgcctcccgggttcaaatgattctcctgcctcagtctcccgagtagctgggattacaggtgcgcatcaccatgcctggctaatttttgtatttttagtagagatggggtttcaccatgttggccaggctgatctcgaactcctggcctcaggtgatccgcaggccttggcctcccagagtgctgggattacaagcttgagctaccacgcctggcctccaattttttttttttttttttaaagaaaagcttcagattttgtctttccacagtatgaggatcttggcttttagatggtcccttacctggtcctgctgctcctctgcttcaaggtgtccattcatctgctggtcctctgctctgttacatcaacgggaccctggccctgggtcttaagccatagtaggctggtaggagcaaggagtcaggtctcactgtcctggcctgaccttcagctctgtggaggagaggtaagtgmggagcagcattgacagycaactgcaggaggcccttccaggctcaatgtgcctgagaaccaagaggcaggggcctccctggcgggtggggggaagagtagataagtcattttaatcactgccccagccagtccatctggttgcacacaatatgtatgctataataggagtgaaggctaatttttattgagcacttattatgtgcaaaatattgacctcagcagttttattaactttcataatcctgaaaaacaccctgtgtgccaggcctgttgtcatcccctttttgtccataaggagagtaaggcccaaagaagttaagtgattttcccaagatcacagagaggttaaatgacttgcccaatcaccccattagtaactagcagagccaggatttgaatttggttatagccttgcaaggccccatctcaccatctttctttgccactacttctccctgggtctccatctcacccctctttctaggtctccttcctaccctttgggcctccattccccccacccccaagccacggagtctccattttgcctcccctatgaaactctgtctccctctttctaggtcagggaagggccatctaggggccgggggagaaggagaagcggaactcaaaggatgggaatacaggatgctatagattgaggtgcagcaagatcatctcgggttagaccttaagtaggacttcccaagcagcggctgcgcctacgaagtgcagcgcgagatcagggagcggtgaacctgataaggaaacgcccgaagcgtggggtcggaaatttccagatgccccgactagccctgccagccccgcctcctcacctccaacactgggcccgccgggtcctccgggagccactgagaggccgtcggygtcgggccagagcgtcaccgcgcgacgcatcgtgctagctacacgcatctcgctcccagatccctttcttccggaaagctatcgagaacacggcctgggtagggccagagaggcccccgacgtgctggcccttccctcttggacgttgcgcttgttcctgcgctctatgctctctgccgttatcgcccggctagtcagtcgtccaactcaccacagagaagtccggatcgtggtagagcgccgcgtcgcacccatgtgacgtcacggcggcgccactcgcttgaggctttccccgcccaccccagcccgttctctctttccggacctggccgagcaggaggcgccatcatggtgagctcgctttgcggcgttcggggctggataatccgctgccatccgccgtggttttgggctaggggcacgctggagggcggcagggggtctgcggctgcccggagggagcaattcccgatactggggacctactctgggggccaggaragcagggatgggtcagtcatagcctaccgcccccacttagtagatgaccaagtggaggtactcggaggctgatatgactgggtttacaaagccaggaagtggcagagccaggattccgacccaggtggctggacccgcagccactcttagttatttggctttgctgcctttatctggacctgtcactttctagtatgaraagtcgggttcgatgggggccgcggcgggtgagaggatcgagagccgaataactggatttggggaccaggcaggtctctgagtctcaggccccttcccaccttgtgatggtttttgagcctttgcmccagtgtctggctgttcgttgggtacacagtaatctcatctgacaagtttgtgaatttgggaagaaataattcacaggagatgctcatcacggggttttgcacacagtaagtgctgcataagtggagctattaaatagttcttgtaattgtcaacacagtctgaaaaacttaagttgctcagaaaggcagcagggcggtaggagcctggcgaggcggctcacgcttgttatcctagcactttgggaggccgaggcgggaggattccttgcccaggagatcaagaccagcctggccaatattgtgagaccctgtctccactttaaaaacgatgttttaaaaagacactatttggtaagggttgttggattgactgatgctgtaggagaggtggttctagtagtattgctaggttctgaataaggattcgttttcatcattactgccattggtttgatatttttggttatccctccgggtatgggaaccagttttgataacattgttgcaaaatacaagttgtaaagaattgacctttttgtattaagttaatatgattgctgtgttacgatgtttcagggttctgtgtgccatgggctgaaggctttgtaaacagcccctttttacagagggatcagtggcagcccacaggtctcctggtggtgggcctgggatttgagctggtgtgttcagacctgggcttgtgtcccagctctcagtttcagaaataagtaataattggctatggttgggggtaattgggtccatggttgcctcttcacccccacagggagtggacatccgccataacaaggaccgaaaggttcggcgcaaggagcccaagagccaggatatctacctgaggctgttggtcaaggtgaggctgggccctgaggtctttgggaagggtcaccccaggtctgacttgcagatcctccattctagtgctggcaccaagctcctcccaggggcctgcagagcagtctcgggtctctggttctgttccagggtctcctgcatttgtattttcagcctctaggctgtgtacagctcgggagtggagccaggattttctaggtccttggccaggaaggacctgggccagctttctccctctaggtcggtgggttgggggaaagggataaagattvttttagtccagatcatcatgtgtttgccccttcactggaaggctgcgggggagcaggctgtcccagcttctcactgtcttcccgtccctccagttatacaggtttctggccagaagaaccaactccacattcaaccwggttgtgttgaagaggttgtttatgagtcgcaccaaccggccgcctctgtccctttcccggatggtgagtggctggtccagagagcacggtagacctgggagccgctgggtcttgtctgtctggaagggaggcaggacttggagctctgggagcaaccagggcatcaagggtttgtctcagccagtcgcgagcgtagagcttrgactgttggttggaactgagtgtccatgggcagtgggcaagtctcctggtcctcctctccttctctttgtgaggtggaggtgtcctggtggcttcaggagattgccccaagtcataactgagttttatgtcaaaggctctgctgagggaggccctattgaacagtctgcatttttttttttatctggagctttccccagctggacctgaggagaggcctgtggggtttaaggggtgtggtgtgagtggggggtcccgttagagggcacagctgccctggcctggggatgcctcaagcggggctgaatgtaaacaccagaacaacttacgacgtacatcctccccaccctaagatccggaagatgaagcttcctggccgggaaaacaagacggccgtggttgtggggaccataactgatgatgtgcgggttcaggaggtacccaaactgaaggtgagctggcgggggctgggcagacccatcagacccttgctgtrctgtgctgtgctgtgctgtgctgtgctgtgctgtgctggtccatcctcagtcttgccaccgctggtgaggcaagcatcctgcctgtctgagtggctttgaggattggtgtgggtcgtctctggcatggttgatggtggggtcccctgggcaagcttcttctggggcaagttgtaaactgttagtgctggcccctagagccagacagcctgggctcaagtctagactcctttgtcacctctgcacaggtctttttttggcccagcttccttgctgtagtttctagcataacaccagggatgtggtggtgaaagttccggaagtgttgagaactgctgctgtcagcccagggtgctccgggtagtaaacgatagtgttggttaccagggctctgctgcgccaaggcagtggagggtgagtcctggcagcccctgggtgaccacgcaggggtctgacccgccagccttgtcctctccaccaggtatgtgcactgcgcgtgaccagccgggcccgcagccrcatcctcagggcagggkgcaagatcctcactttcgaccagctggccctggactcccctaagggctgtggcactgtcctgctctccggtgagtgatacgtggtcgacgggtttggactgagctgtgtggctactggcagccttcaccctcctggatctgggaggccagaagctgggcgccagatccctgtctcacccggttctccttccccttccctaggtcctcgcaagggccgagaggtgtaccggcatttcggcaaggccccaggaaccccgcacagccacaccaagtgagtatcaggcccccagccctgccctctccccagactcagcctgcagggccaggcctggccacacttgggctgcttctcctatccctcgtaccagccagccccaggccttctggaactctcagctgcctcatcctgcctgcttttcccttcaacactgcttggagctgtgttttccagggcctgagcaggcatctcctggggagcatgcagttcaccggcctttgccagcccaggctgggaccctccaggtggtggggcaggtgcttccatagcccctcctggctccttggcttcccactctgccaagcttttccagcagcattgactctcctggggctgaatgtgacaggcttgtggtgttcctgtgccactccacaatggcctcctttaagagggcccccctctcactccctcctctccccacagaccctacgtccgctccaagggccggaagttcgagcgtgccagaggccgacgggccagccgaggctacaaaaactaaccctggatcctactctcttattaaaaagatttttgctgamartgctctgtgtgtgttattgggggatgggttggagaattggttcctgcgggtgagaatgcatttggtttggggacagggacgtcatgccagtgaagaccagccctcttcctgcccccactgccccggaagctccctgcctccttcccaacagccaggtggcaggtgttcccacaccggcttccttgggtcagccacgcccgcccctcttaaaggatcctgtgcccctccctggtgctgggatggcgggtggggcgtggaccgggaagtgcagggtgcaggctggcagggctgtggggagggagagactgcctgggaacaggtgaggcaatctcaaccccccggggaccgggaagcctgagtctagaggggcgttcaccccctgggagagcacaggtaaagaaagcgtgtgagccgcacccccggacctcctccaggggcctgtgggggccctcctgtgtttacacaaggggccgggctccctggattccaggtcgaggcctgatgagtgaggccagaagccgggaagcaccgcagaagtagaagccggggagccacagcctacgttctcggaaaaagcaggcactggaagggaggccattgagcccggcactagccggtgtgggtgagccccggcgatgggggggatgggtgagggtggggcggggaggctggcctgccttgactcctttcttctctttgcagctccctgctgtggtctggaggaagcagcggcctgggttggtgggattggaatgaagggcttctggtttgcagggatcaagggtccagggtccccgaggttgggtcaggagcctcaaggggataactgaggcttgggagggagacagggcgagatagagactggcccctgtccgggaagaagcgtccgggtagctggcaggagatagcatttaggcagaaaccaggctgggggcagcttgggtagggctccccgcagatcagaggacggcctggaacaggtcccagggccaggccccaggcaggggcagccagcctgaggagggtggctggttaggtggcactcacacctagatgggctgtgaagatcatagacctgtcccatagtaatggagacccctgtagcgcatttcaccctccactgcagcagctggaaggagtgtgaggagggtccagggagcagggtcccccattgacagggtagggaagggtttgccaagccttcggcctttaaggctgagcgagcaggcccagtggagaggcatcctggctggtctgcgggtgagagctgatgagcaggagaaactcgtgggggctgtcagatttggccagagacagatgctccaacaggcagatactgcgactgtcagtcggaagccattggcgtttgccagacagtggaaggagagggtcagttcgtcgtgctcttggccgggggcaggcaggcaacctgtcgtgcctttaaggacctttgggtgattagagacaggcaggcagcttgccacctggaaatgatcaagtggtcagcctgaccaaattcaggacagctgaagggtctgactgggcactgtgtgactggtgggttggaggctgtcgtgtggctgagcagagatggccagctgatgggtcacacagttggggatggtgtcaggaggtcaacctgaccagcagagacggctggcaggaaggtcacggaaggccagccaggcatggtgccactgggtgcaggcaggtggcggatctgagtggcctgacacattggatggtcgcttatttgggcagcgtgattgtcagaacagtgtggcaggggctgctgcagggagccatttggacatctgcagggccccgccggaggcctcggatggccacgtagggtctgcctatcaggagaacccccagatgatcacagtccccagagacagccagacccccggggacccagcctctcacagtcagtcctcccacccgagtgaccccgatggcggcctcccagctggcggcgctggaaggagtggactccggtcccagggtgcccggggccagccccggctttctatattccgagggccagcggctggcactggaggctctgttgagcaagggcgcggaggcgttccagacctgcgtgcagcgcgaggagctgtggcccttcctcagtgcggatgaggttcagggcttggcagcggcagctgaagactggacagtggccaagcaggagcccagcgggatggcagagggagccaccaccaccgatgtggacgcgggcagcctgagctactggcctgggcagtcggagcagccggcgcccgtcctgcggctgggctggccagtggactctgcgtggaaaggcatcacccgggcgcagctgtacacccagcctcctggagagggtcagccgcccctcaaggagctggtgcggctggagatccaggctgcccacaaggtgggtgtcgcgggggccctgtgtccattccccagactgggacggggacccaggcattctctcccttgtcctcctgggacttgcaagcccacacccctaccctaaaggacctatacccctgggacccaggagtgcacaccttccagccccaggactcaggtgcctacaaccccagacctcatccttactctcagaaaggggggcccggccgggcgcggtggctcacgcctgtaattccagcactgggaggccgaggtggacggatcacgaggtcaggagtttgagaccagcctggccaacatagtgaaaccccgtctgtactaaaaatacaaaaattagccgggcatggtgtgggcgcctgtagtcccagctactcgggaggctgaggaagcagaattgcttgaacccgggaggcggaggttgcagtgagccaagatcaagccactgcacttcagcctgggcgacagagcgagactccatctcaaaaaaaaaaaaaaaagaaagaaatgggggcccctaccctcccccaagacctggatgcccttaggtatcgatgccccttgaacctaattatgacacccccagtctcagtcattcccccatcccctcatcaccaagccaggggtttccactctccctccaaggaaggcccagatgtccacactgcagcccttggaaagcctgctgtgtacttcacagccttagcgtccgccagctcccacgtgaagggtttctcagggactaatgtgcatcatcgtcccggaaccctgtaccgccagagggactattgtgcccacggaggcacgggggcggttaaatctcttccctgtaagtggccgagtggggatttgaacccaggctgtctggctgctgagtcagggtttccactgctttatgctgcctgcaagatccaggccttcagcacctccgtgtcccccaagttcgccacggtggcctagcaggtcagccgtcctgcacccagcacccagaaaattccacaggacccagaaatgcagttgcccacagtgccctacgggacatccaccactgatcctacagccaaactgccgtggacatttgggtaccgcagtgtcgcagctcaggggacgctgttctgtgttataaacgtgatttgtaggccagccacggtggctcacggcctgtaatcccagcactttgggaggccaaggctgggggatcacctgaggtcaggggttcaagaccaccctggccaagatggcgaaatcccgtctctactaaaaatacaaaaattagccgggcgtggtggtgggtgcctgtaatcccagctactctggaggctgaggcaggagaactgcttgagtcccagaggccgaagttgcagtgagctgatattgcgccactgcactccagcctgggcaacagagcaagacttcgtcttttaaaaaaagaaaaaaaaagccgggcgtggtggctcactcctgtactcctagcactttgggaggctgaggcaggtggatcacgaggtcaggagatcgagaccatcctggctaacacggtgaaagcccatctctactaaaaatacaaaaaattagctgggcgtggtggtgggcgcctgtagtcccagctacttgggaggctgaggcaggagaattgcttgaacccgggaggtggagtttgcagtgagctgagattgcgcccctgagctgcagcctgggagacagagtgagactccgtctcaaaaaaaaaaaaacaacaaaaaacaacaacaacaacaaaaacacaaaaaaacaagcaaacagtgatttatgattacagttttccagcatttaggggccgggaatctcgaggaggggctggggatctcatggaggggcagcgttttgctcattcacacgtaggtgctgtttgagcagcagtgtatgtctgggggtctcccctttagcccccctgaactttaaactcccagcccccagagcactttactcccagattccagatgtcaggtttcccacaccctctgagtgtcccctgagccagcttccgttcacaagcccaccgcccctctccccatgcccagctggtggccgtggtcatggacgtcttcactgacccagacctgcttttggacttggtggatgctgccacgcgccgctgggtacctgtctacctgctcctggaccgccagcagctgcctgccttcctggaactggcccagcagctgggggtgaacccctggaacacggaggtaggggccgggccagggggtcctgtgagtccccattcccctggcatgggggcagtgggggcagacccttccatggagctccgggtcattgagatggatgctagcagggatggtcccctgggatctgatgcccacagcactggggaggtgggggtgggcattcccaaggaatcttgagtcactgagtttgggtatccccaagaaacgcctgagggttgatatcagtggctctaaggaagctgagacagatacttcttttttttttttttttttttttttttgagacggagtgttgctttgtcgcccaggctggagtgcagtggcgtgatctcggctcactgcaacctccacctcccgggttcaaacgattctcctgccttagactccccagtagctgggattacaggcatgtgtcaccatgcctggctaacttttgtatttttagtagagacggggtttcgccatgttggccaggctggtctcgacctcctgacctcagctgatccacccgcctcggcctcccaaagtgctgggattacaagtgtgagccaccacgcctggccttggacagatacttctatggagtcatgggtcccccagttagaaccagtctggagggagcctgaatccatgcagtgggcctcagcaagggtgtaccctccactccccacaccaacagaacgtggatgtccgtgtcgtgcggggctgcagcttccagagccgctggcgacggcaggtgagcggcaccgtgcgggagaagtttgtgctgctggacggcgagagggtcatctcaggatcctacaggtgtagcccccgccccgccccccacctcccggcgtcctataccccactttccctcagtgtgctcagagaacagctggcatccccttgcccaggcctctcttttctcatctgtgtaatgggggcaaaacactcttccctgcggaggaggttggtgccgcggccggacctggtgctggcctgtttagtggtcttgggtaagtctgcttctctttgacctggtgttttcttatctggaaaactgggcaaacagtttgggggtggggtttgttcaaaatcaggagcacctggattgggatctaagctctgcctcgggtaaataactccacctctctgagcatctaagaaaatgcccggacatggtggctcacgcctgtaatcccagcactttgagaggctgaggcgggcagattggctgaggtcaggagttcaagaccagtctggccaacatggtgaaaccctgtcttcccagctacttgggaggttgaggcaggagaattgcttgaacccaggagagaggttgcagtgagccgagatcgcgctgtcgcactccagcc

SEQ ID NO: 94478 - DNA, 81302 bp, Homo sapiens
  misc_feature (1)...(81302): n = A,T,C or G
aaagaccttactggcctggcgcggtggctcatgcctgtaatcccagcactttgggaggctgaggtgggtggatcacctgaggtcgggagtttgaaaccagcctgaccaacatggagaaacctcgtctctactaaaaatgcaaaattagccgggcctggtggtgcgcacctgtaatctcagctattcgggaggctgaggcaggagaatcacttgaactgggaggtggaggttacagtgagccaagattgcgccattgcactccagcctgaataacaagagtgaaacttcgtctaaaacaaacaaaaacaaacaaacaaaaaaaacctagctgataaaatagcctgcagtaaagaagccagccaaaaccaagatggagacaagagtggcctctggttgtcctcactgctgtactcctaccggtgccatgacagtttacaaatgccatggcaacatcaggaagttaccctatatggtctaaaaaggggaggcataaataatccaccccttgattagcgtatcatcaagaaataactggccaggcgcggtggctcatgcctgtaatcccaatactttgggaggctttggtggatagatcatttgaggtcaggagtttgagaccagcctggccaacatgataagacccccgtctctaatactaaaaatacaaaaattagccaggcgtggtggcacgcacctgtaatcccagctacttgggaggctgaggtaggagaatcgcttgaacctggaaggcagaggttgcagtgagctgcaatcgcgccactgcactctagcctgggcgacagagtaagacttcgtctcaaaaggaaataaccattaaaatgggcggccaggcgctgtggctcacacctgtaatcccagcattttgggaggccaaggtgggcggatcacgaggtcaggagatcaagaccatcctggctaacatggtgaaaccccatctctactaaaaatacaaaaaaaattagccaggtgtggtggcaggcgcctgtagtcccagctactcgggaggctgaggcaggagaatggcatgaacctgggaggcggagcttgcagtgagccacgatggcgccactgcactccagcctgggcgacagaacgagactctgtctaaaaaaaagggcaaccagcagccctgggggctgctctgtctatggagtagccattctttagtcctttactttcctaataaacttactttcagtttactgtatggactggccctgaattctttcttgcgtgagatccaagaaccctctcttggggtctggattgggacccctttcccgtaacagtgtcagaggtgtttgaaccagaggaaccccgacttgaataggggctgggtaaaataagactaagacctactgcactgcattcccagatggttaaagcattcttagtcacaggatgagataggaggtcagcacaacatacgggtcataaagaccttgctgataaaacaggttgcagtaaagaagccggccaaaatctacccaaatcaaaatgacctctggtggtcctcactgctacactcccaccagygccaagacagtttagaaatgccatggcaacgtcaggaagttaccctctatggtctaaaaagaggaggcatgaataatccaccccttgtttagcatatcatcaagaaataaatcataaaaatggggaataagcggccctcggggctgctctgtctgtggagtagccattctttgttcctttattttccttataaacttgctttcactttacagactctccctgaattctttcttgcgtgaaatccaaaaaccctctctggggggtctggatcgggacccatttcctgtaacactgggaggctttggtaagaaacggactgtccagacatctggtggccacagagtgttcagtctgccttcgctgctcttcctggctgggagccacaaatcttccatgctttactttctaaataccactcccttccacccaccgctctctacttccactgctcccatcctggtctaagccaccatcgtcctttgcctaaatgatgaaacagcctccctccaccctccctggctccgctccaatcactttcctgcagagcagccagagtgatcactttcaaatgcaaacctgaacttgcagctcctccgctcaaagcccttggatggtttccaccagcgtgaatgctaaagcctgaactcagtgcataaggtgctgtgtgttccgctcctctggctgctccgggattatcttgtactctctttcttcccctccctctmtgcagcctgggaaactcgtcttaaaaaaaaaaaaactcttgaaatgtaccatgctgtctcccacctcaaaaatcacagctgttcgtgatttttctcatgatgaatgcctacgcattcttcagatctcagctagaatgccacctcctctgggaagcctccctcatctcctgcaagactgggttaagtttccctaggtaacaggtggtattttccaaaaatagccacaacatatttcctgtcccacatgatactcttggccatttgccctcctcttgaatttaggaaaaactttgtaacagcctgtatggaaagaatgcaatggaaatgattctgcgtgacttccgagtctgggtgagaaaaggtaatatgggagctgggtgcagtgatgcatgcctgtagtcccagctactcaacagattgacgtgggaggatcctttgagtccaggagtttgaggccagcctgggccagcctgagaccctgagtcccaccccaacccctgccatctccggaagaagaagaaggagaaggagaagaggaagaagaagaggaagaggaagaagaaaaagaaaagatgatatgattcccacctggctcacacgctcacttgttcttagaacggtagttgtgaagaagctcaggctgcaaggagaccacatgtaggtattccaagcaacggccccagcgagggtctcggcctgtagcctgtagcaactgacatacatatgtgtgagcaaacattcaggtgattccagcccccagactttgagccacccagctgatgccaaggttgagttattcctcccaagcctgcccaaattgcagattgaagagtaaaatgaatgtctcttttctttctttttttttttttttcaagacagggtcttgctcttgctctgttccccaggctggagtgcagtggcgcaatctcagctcattgcaacctccaccttctgggttcaagcgatactcatgcctcaacctcccaagtagctgggattacaggtgtgtgccaccacacctggctaattattgtatttttagtagagatgggatttcaccatcttgtccaggctggtcttgaactcctggcctcatgtgatccacccacctctgcctcccaaagtgctgggattacagccatgagccacttgccccgtgaatgttgttgtcatttgaagcttctaagtcttgagctgctttttattttcttttacagaaagcccagaccttacaatgtttttattttttctctccatttttctttctttttaatgtttttgtacagatgggatcttgctatgttgcctgggctggtctcaaactcctggcctcaatgcatgcccccaccttggcctcccaaagtgctgggattgtcaagggctcatttgttacacagtcatagcaacagaaatttaggaactgttacatgtataccttctctttaaagtatttgttacatgtgaaactttacatttgtgtgattactagattcctgtctatcctgagagactaaaagctcttaacggccaaatttgcgttcctttttaccattctattcctgacacttagcaaggtgcctggtaaatgatgcactcgatgccaatttactctcaactttcctgcacctcttcacttataaaaagagaaagcacttggtcattaattgaacgttcacttatttgatgaatgctgactgagagactgtgtcagggatttgtattagagacggacacaaaacaaatatgaaatacaagggactgaggggagacatagaaggggactgggaacacttcctgagggaaagggatatttgggctgcgtttagaaggatgtataggtgttttctgaataacaaagaggcatgacagtacttctggcaaaggaaatggtgagtgccaatgcttgggaccaggaagcagccaggttggtcaggcaattgtgtgaagttctgcacagaggcaggcagtttgcttggaaaatcctgcaggaaaaggttcctaaggaccaattctgacagcctgcaatgtaggtgcttagatttcatctcattagaaataggaagaccttggaggtttggaaggagtggtggaaaaagtggagttttttgtttttctgtttttttttttttaagagatgagatgctctttaaaaaaaaaaaaaaaaaaaagcactgctatgcttcccaggctggggtgtgcagtggcaagatcatggctcactgcagccttgaactcttgggcatgagcaatcctgcctcagcctcccgagtagctgggactaaacgtgtgcaccaccacgcccagctaattttttcattttattttattatttaattaattaattaattaattttttgagacagagtttttgctcttgttgcccaggctggagtgcaatggcgtgatcttggctcactgcaacctccgcctcccgggttcaagcaattctcttgcctcagcctcccgagtagctgggattacaggcatgcgccacaaagcccggctaattttgtatttttagtagagacggggtttctccatgttggtcaggctaatctccaactccagacctcaggtgatctgcccgcctcggcgtcccaaagtgctgggattacaggcgtgagccacggcgcccagccaattttttcattttctttttctttttttcaaggcccggctaattttttgtatttttagtagagacggggttgcaccgtgttagccaggatggtctctatctcctgacctcgtgatccgtccgcctcggcctcccaaagtgctgggattacaggcgtgagccaccatccccagcctagagttcttgatagtatcagggctgagaaagtaccagagttagagccaggtggggtggcactaaaagtacaaaaaattagcagggcgcagtggcgggcgcctgtagtcccagctactcaggaggctgaggcaggagaatggtgtgaactcgggaggcggagcttgcagtgagcggagatcgcgccactgcactccagcctgggcgacagagcgagactctgtctcaaaaaaaaaaaaaaaaaaaaaaaaaaaaagaaagtaccagagttaggaggctcctaaactggtccagatgggaagtgacggggccaaggatagggaagtgaagatgggaggagtaggactaacttaaaggccatttagcaaaaattcaccacgcaaggccctatattagggcgctgggggctcatacctcatcgtcccgtcaactctataaagcaggggccaacaaactttttccataaaaggccagatcgtaaatacttcagggtctgcagatctgtaggatctttagcaactacctactctgttgtaaggcgaaagcaggcagagaagccaggtaaacgcgtgggcgtgtctgtgtgctaataaaactttattcagggaccctcaaatgtgaatttcacaaacttttcacaggtcatagactattcttctttggatttttcccccggctatgtaaacatgtaaaaataattctgagcttgcggggccggacaaagtaggcggcgggtcttggctcgcctacccctgctatataaatcattaattatgataccaatcttaaggagaaggtcttcagaagagtccctcaaagagcaccgcccctcaacgtcatcaaaccccgcctccaaaggcggaggctgcgcatgcgcggcaggacctcgggcgggggcggggcggggcgcagctccgacttcggacatggcgcacgctggcggtggcagcggtggcagcggtgccggcggccccgcgggccgggggctgagcggcgcccgctggggtcgctcgggctccgcaggccacgagaagctgccggtgcacgtgagtggcgtccccgccctccctcggggaacccatcttctggaccccgcgggcgggcgcccctcacccaggccccgcccggccccagccccacctcggcctcccctctgcactgccccggacccctcacccctcacctctcacctcggccctccgaaagcccagcccatccccttcccctcagggaccccggcccctcgtcccctcgttccgcggccagggcccaccgggaccctccccctctctgcaggtagaagacgccctcacctatctggaccaggtgaagatccgctttggcagcgaccctgccacctacaacggcttcctggagatcatgaaggagttcaaaagccagaggtaccagcggggcccctctccacctcaggggacccccctgggccggaatcgggcctagcggggtgagacctcccctctccagcctgcccccttagccgggtgaccttgcgcaggttgtccaatctctcagagccctagctccttctcgtaacaaaaatggaaatgggtagtacccaccttgtggagctttgtggggattcctggaagcaggacagggatctggggggaggcagggagggcgaggccgtgcacactcatagagtcaaatcctgccttgatttaatatgttgatttttatattagttttgttcatgaaagatttggtgggacccattttgatttttattttcaagcgctgtaaaatgttattgtcttgatgattgaaatttttggcaccctcttcccctttaatcttgtcctcaagatgcttctctgggctcactgtggtcccaggcctgcttggaagtaagacgcataaaatgcttagtaagggagctggcacacagaaaacgtttaaaacacatgagatgattttgcaggcccagaatcaaggaagattacagatagatgggaaaccctgggatcatgcccttgtttttataggagactcactgagrtttggagtgggtaagggacccacctaagtggcagaggtgtcactagaactcagaccctctgactcagattcttggaagtcacatscttaccatactgctgccccctcttaggaaacatggtggggctggcctggtttccttccgggagcccagtgctaagggctgggctgcaatgcagccagaagggagaccccatctctcccctcctatttttcttacacctttcccattcttggcagtaccattggtatttatgcattgcaattgtttgctcagatggaaacctgtgtcatagtcatctctatctgatacaaaatgagggaagttttcacattgcttagaggactttggcctcctgccatttcttggagtccaggccttgcggttggctctcctgacattttcagaaccgagtacccattcttggagtgttttaggggagctgagcgatgtcagtattctctggttctcaccaggagggaacagggagctcaggcctagccagtcaggagataggtcatggtgtacagatgctatcacatgggggcacttttttttttttttttgagatggattctcgtgctgtcgcccaggctggagtgcagtggtgtgatctgggctcactgcagcctccgcctcccgggtgcaagtgattcttgtgcctctgcctcctgagtagctgggactgcaggcaygcaccaccactccaagttcgtttttgtatttttagtacagacagggtttcaccatgttgaccagtctggtctcgaactcttgacctcaggtgatctgcctgcctcggcctcctaaagtgctgggattacaggcatgagccactgcgcctggtgggtcacattttaggttcctttgttgtctgttgagaaggtttttatgtggcagtatcaagggagtggggaatagattatatttttcatttatttcccaagacccttttgcccacttccgttgtttcttctagcatcgatactcctggagtcatcagacgtgtctcgcagctcttccacgagcaccctgacctcattgttggattcaacgcttttcttcccctcggatatagaatagacattcccaagaatggcaagttaaacatacagtygcctctgacaagccaggtatgccactacagtggttcgggtgatctcagccttcaccgagtatgtcttgctactcaggttgggccacgtgtctctcctgtatcattgctagaaagccacttaagatctgttctttttctagacgtgctcattgcttctagcacaaatcaaaatagatatggaaacacctacacaagcagcctctgcctcccaaattgatctgtttggaagatttaaatcaagagtggatgtcagggaggtatcctcctaaygcagaattttgtgtgaagtctaaataaccacctcagcagttgctgaggtcttggcttgaggctttcccagcgagcataccaggcaggcttgcccttgtatttaagcatgtcctcgtctgcctctgatcactctcagtaccacctacaaaataaagtggtcgagatggtgtgtgagtagccacgtttatgttggctgtgtttcatttaattgttgataggatcattagctcagctgggactcctggctttgctttggtcccttttttcttgggtgataggtgctggccctctttttttttttttttttttttttggagacggagtctggctctgtcacccaggctggagtgcagtggcgcaatctcagctcagtgcaacctccgcctcccaggttcaagcaattctcctgcctcagcctcccgagtagctgggattacaggtgtgcaccaccatgcttagctaatttttgtatttttagtagagatggggtttcttcatgttggccaggctgttcttgagctcctgacctcaagtgatctgcctgcttcagcttcccaaagtgctaggattacaggcgtgagccaccgtgcccagcctccttttttttttttttttttaagacaggttctcactctgttgcccaggctggagtgcagtggtgccatcatatctcactgcagcctcaacctcctgggctcaagtgatcctcccgtctcagcctcctaagtagctaggactacaggcgtgcaccaccacggccagctaatttatttattttttttgtagcgacagggtctcactatgttgcccagggttggtctcgatctcctggcctcaagcgatgtgcccaccttggcctcccacagtgctgggattacaggagtgagccactgtgcctggctcactgccccttctatctctgcagtctcttcatgcttgagcttactagcgcctctgagaaaaagaaagcctacttaagatttccttttataagatgaccattgtcattttttccacctcaacactatttcccatttaaggcataattctttgctgttgggggcttcccagtgcattgtggggtgtttagcaggatctgtagcgtgtacctaccagaccttcactcagttctgacagccagaaatgtctccagacattgccaggtgtctccctggggggcaaaagtgcccctgttgagaaccaccggtgtaagtggaccagctctcccaacctcctccagtccttgcctcgagagttttagcagggagtgtcagaatctactgctggaagcacttggtaggtcttctttgatggaagagatgatagagcgtccaatcaattagggatctgacactccgcagtcagttggaaagagaacagcgaagggtaatgtggcagtgcttttgtattaattccatgtgcaaggtgtgtgtcaattctgctgcttctcggccaggcgcagtggctcacgcctgtaatcccagcactttggggggccgagatgggtagattacaaggtcaggagttcaagaccagcctggccatcatggtgaaaccctgtctctactaaaagtacaaaaatcagccaggcgcagtggagcatgcctgtaatcccagctacttgggaggctgaggcatgagaattgcttgaacctgggaggcggaggttgcagtgagcagagattgtgccactgcactgtagcctgggtgacagagcaagactccgtctcaaaaaaaaaaaaaattctgctgcttctctgtgcaagaccctctctgccatcagcctgttgtctcctgaaagccaaggagcgagtctcagggttttttttttkccttttttgagaaggagtctcgctctgtcacccaggctggagttcagtggcgcaatctcggctccctgcaacctccacctcctgggttcaagagattctcctgcctcagcgtgctgagtagctgggattacaggcacgcttcatcatgcccggctaatttttttgtatttttagtggagatgggggtttcgccatgttggtcaggctggtctcgaactcctgaccccgtgattcgcccacctctgcctcccaaagtgctgggattacaggtgtgagccaccgcacccagctgaatctcagctttaaaggggaacttggaagcgtgtggccactgaactctgaagagccttccatttcctgtttgcaaatgaagccccaggatccagatgtactgcttgtgtcttagaccatgaaagccttagcaagactgatctccagaacagtcacgactgcgggagaaagccaagctcatttgcaatagcagcgtccaccagagcactttgcagagcctgaatgctgtggaaactctgggtctcgttcctgtcactcactcagaaagagccagagtgaaaagatgtgaactgtgcgtcctgcatgtggaaattgcctttcagcagagtccctgcccgtggagtaactcggctttcagggctagatcttgacaggcgccacactggttgtatttggagttggctcttcctttaagtagctgcgggtccccaaccgtggagggctggcagtcttgtctccccgtaggtggcttaggtgacaatgatgacggtgcagacccatcgacttggggaaaggcttgaaaagaactttcacttagtagctactcagcagggccttggtcatcgtgctgcagcctgggaacagtcatttccaggcttaggtgtagaagtttgttctcttcgggggcccctgggagcccactggcttccagttgatattgacacaggtgctgtcaggtttccagccctgtttcccagcagtctgggctgttgtttgtgtggcttcaggacagaaacatgagagatatcccaggtccaggccatgactcgcgtggcttcaggagtcctttgagctttcggctccctggagtcctttgagaggccatcgtctgaaagcctcacagggtttcccacacacagaggccctggtgatattctttctttctttcttttctttctttttttttttttttgtgacagagtttcagagtttcgctctttacccacgctggagtgcaatgacacaatctcgactcaccgcatcctctgcctccccagttcaagcgattctcctccctcagcctcctgagtaactgggattacaggcatgcaccagcgcgcccgactaattttgtatttttagtagagacggggtttctccatattggtcaggctggtcttgaactcccgacctcacgtgatctgcctgcctcggcctcccaaagtactgggattacaggcatgagccactgcacctggccatcttttttttttttttttttgagacagagtctcgctgtgttgcccaggctggagtgcaatggcacgatcttggctcgctgcatcctctgcctcccgggttcaagtgattctcctgcctcagcctcctgagtagctgggattacaggtgcctgccaccactatcagctaatttttgtatttttagtagagatgggatttcaccatgttggtcaggctggtttcgaaatcccctgacctcatgatctgcccacctcggcctcccaaagttcttttttttttttttttactttaattgaattattttttaattttgagacaccatttcactgtcacccaggctagagtacaatggcgtgatctcagctcactgcagcctccgcctctgaggttcaagtcattctcctgcctcagcctcccaagtagctgctattacaggcatgtgccaccacacccagctaatttttgtatttttagtagagacaggttttcaccatgttggccaggctggtctcgaacccctgacctcaagtgatcccccacctcagcctcccaaagtgttgagattacaggcgttagccactgtgcctggccttttttacatttttaaaayagagacagggtttcaccatgttgtccaggctggactcaagtgatcctcctgccttggcctcccaaagttttgggattacaggtgtgacccaccacgcctggccagtattctctgtygcttagtttttctagtttgactgttttgaagtatctttttccccccccaattttatcacaaagcctgccagctactgacaagtagggagtggcccataggtggtaaggaaggtgaataagagagtcccagcctcgggcagcctttggcgcagggtgtcttcagctttgggggccagactgttctttatggcgaggtgccgtcctgcacactgaagggtatttgagcagcctccctggcctccacccaccagatgcttctagatgtgataacctaaagtgtctcccgtgttgccgagtgtcccctgggtggcagagttgctcaggttgagaacacgagtctaaaggggaagacagacacaggccgtggtgtgtggccagtgacgacctggggaatttggaggaaggaacagcttcttactggagccttgccttggcctcctgagtcagcatcatttactgtctggtaattcaggccttggttgtaatgtcagctccacagagagccccctagtccctaccctgtgtcattcttacaccaccctgggttatgtatttcaaaacggctaggaaaagaagttcagaatgcattgtttcttattggttttccttccttggttgacggtgagtccttaagatgaggtgggccctgcactgtcttgttcatgactgtatccaccttctggaacgtcgccagggagcagtgcatggtgcaggaatgagaaactggatgctggtgggaacatggccgctctcagctagcgggtcctcttcagggcagaccctgcctcgtggaagatgacagctggcttggacagagacagagataaccccttaacgtgcagctcctaacttaagcagcccctcgacattcaaagggagccccctggctgttctctgggggaagtcccgctagttgtcaacaagtcrattcttgtgtttgtatcttcttggctcatggagcaggcggtgaccccttctccgagccaggccctggggtttattcagaggccctgctytcagggttcctgcacagtcaaggtggggggtccgatgagaaacagatgggcagatgcgggtggcgcatgggagagggcagagagaggatggagcaggccagggaagggtgggaggaggttgctgtgggcaggacctgtttcatgagggactgttcctggtggggagtgatggcctgaggtgagagtgagtgggtgtgcttgaggaacagccaaggagaacggcagggtcaggagctgaaggagagaagggggagagggagccaggagcrtgagaaccactggatggttctgggaggcggttctgctgctgtgctgagaatgaggggtcaggaggcccctgggagaccagggaggggccccaagtgatggaggcggggtagacagtgatggaaacagagtggatggtgacaaggaccagagagggtcccaagtgatgggaacagagaggatggtgacaaggaccagagacaattcccaagtgatgaggacagaatggatggtaacaaggagtagggaaggcctcccgagtgatggggacagaggtggacagcaatggcgacagagtggatggtgacaaggaccagagacagtccccaagtgatggggactgagtagacagtgatgaggacagagtggatggtaacaaggactggagagggatcccccgagtgatggggacggagtggacagtgataaggaccagagaagtgccctgagtgatggggacagagtgactggtgacaaggaccagagggggttcccatgtgatgggggcagagtggatgatgatgtagatcaggagcgggggtgtcagtgagagtgagaagtctgggctgatctcaggatgcctgattctctgggtaaaagtgtgggcccctgctgaggtgcataaggccagggcagttggggggctgctatgtgtctgtgcggtgcctgccatttgaggctctgttaatcagtacccaggcggggctgtgtgtggatgctcagatggacgtgtcggccacgcaggatggttgtcatggtgtgggaggcagttcgaactctgcctgatgaggccacccagggcacggggagagaggaggtgccggaagaaaaagaaaactgggcttgtgctgggtggtttagagcagcacagtcggcaaatggtagcttggagaccaaagccagcctggctcggtgtgattggttgtgatttttacattttcaaaggattaaatttttaaaaatgtttcatattgtgatactgttcacataacataaaatcatcatcattttaaagtgttagtatattcacaatactgtacaaccatcaccactaattccagaacattaacatcaccccaggatcaaaccctgaacctcctaattctcctctccccaagcccctggcaaccatgagtctgcttcctgtctttatggatttgcccgtatggacatttcatatcagtggggtcatacaccgtgtggctgttggtgtctggcttctcactcagcatcgtgttttccggggtcattcacatcggagccggtatcagtgcttccttccttaagactgaatcattctccactgtatggcaggaccacatttcgcatgcccactcttctgttgatggatgtttggcctgtttccaccttttggctgttgtgcatagtgctgcaacgaacattcatgtgtgaggatgtgttggaacacgtgttttctttttctttttttttcgagacagagtctcgctctgtcgcccaggctggagtgcagtggcggggtctcagctcactaaaacttctgcttctcaggttcaagcaattctcctgcttcagccttccaagtagccgggattacaagttcccaccaccacgcctggctaatttttttgcatttttagtagagatagggtttcaccatgttggccaggctagtcttgaactcctgacctcgtgatccgccatccttggcctcccaaagtgctgggattacaggttccagccaccgcgcctggcttttttttttttttttttttgagatggggttttgcttttgtttcccaggctggagtgcggtggtgcattgtcggctcaccacaaccccctgggttcaagcaattcttcctcctcagcctcccaagtagctgggtctataggtgcacaccaccacacctggctaatttttgtatttttagtggasacggggttttgcaatgttggccaggctcgtctcaaactcctgacttcaagggatctgtccacctcaacctcccaaagtgctagaattacaggtgtgagccactgcgcctggcctgagccactgtccctggcctgagcaccttttttcagttctcttggttatagacctgggagtgggattaccaggtcatatggtagcaataattccatggtcaacctgttgaggtaactgccacactgtccctcgtggtggctgtaccgtcccatctggctctttttgccaagccctggtctagagcgtggttccccattttgtcgcagtggcacactttaggggatcagagggtgcatgcggagcttggaaatgcctccttggaatggtggggggctcgcagtgagcctacagctgcctctgaaacagaccttggctccatgmtgcttccctacatacccacaccctgctcgttccgaccccttctgccatcaaacctgtgcaccatggagaaacagacgcagccccctgtgagcctgagcagagaatcattccggacatccccagagaatcttacaacaaaccccgccactgactgggcgcagtggtttacgcctgtaatctcagcactttgggaggccaaggtgggcagatcacttgaggtcaagcgagaccagcctggccaatatggtgaaaccccatctctactaaaaatagaaaaattagccagcgtggtcgcacggcacctgtgatcccagctactcaggagaatcacttgaacccgggaggcaaaggttgcagtgagcygggatcataccactgcactccagcctgggagacagagcaagactccatctcaaaacaraaagaacaaatcccgccaccaaggagaaattgttttagaatcgtggctgctctgcgtcttgtatttctgcttttctcagctgagactttctagaattgtctctgtacccattgttctgggcagaattgtgtcatccccccaccccacattccaccccaaattcatgtattttagccctagccccagcgcctcagaacgtgactgtatttggagatggagcctttgaagaggtgatttaactgaggccgttagggtrggccctaatccagtctgattggtgtccttataagagaggagattgggacacacatcagggacatgcgtgcacagagagaagaccacatgaggacamagacagtggccacccacaagccaaggagagagtccttagagaaaaccaaacctcctggcaccttgaccttggcctcctggcctccaggcctccagaactgagaactactaacttctgttgtttcagccagtctggggtacctcgttgtggcagcctgagctgatggatgcactcaccccactgacggtgcctgtgcccagcagaggtacctgtttcagtacaagacggtagtggtgtgcctggccttgcctgttgcagtagattttcagggtcagcgtttgggtcacctgcagtgttgggcactgcagggcagcggaaacagtgaagtctgtgtgtcccttcatccgttcacctgatcatccccaacagtgggtgaagctcactctgtttctcacactgttctgggcactggggatacagccctgatcaaaacccccaccctcgtggagttcgccatctagtcagggactggcagacagtgcaatgagtaaaatacatgatccataaggtggtgacgggccgcggagaaaaatgcaggagtgctaggaggtggcgtcattttactttggtgaaagagcgttctctaggactcaccaagcagggcttatccaagcaaaaacctcagccaggctggaggaatcctgactggctggagacccagcccttgtgtgctggggatggtgcagcataattctggtttagaaacaacagctcctcctctgggggagtggtcctgtcccaccacaacatgggagggaggcaagcttctttctatttttgctcatatcggctgaaaagtacacgcatagagggcattcttggtgggtgttcagggcctgtcttttctcccaagcgaccgatgcaccttattgcgattggcctgggtcttagcaccaaaaatgtcatgtcccttgaagtccccaacaacctggacagtgggtcgcctctaacctccagggtccccatcttatatatcctaccttggcatcactgctggcagcagttgcctttccacgtgaaagcaatcttgctgaaacagattgcaggaggcgtgggagacttctctattatatgcagcccagcacttggcaccacagaggcttaaacatccactttgtacatttctcctgaatgtgaagttttccaaatgcaaggtgctcgttgaacttgttgtgttccttgagtagattggtaaggatcgggtggaggtgagctgggaagactcacctgtgcaccccgccctgcttgcctccaggctctcagaagtaacctttccctgtctctaatacagcttggctccgtgctgagttttttctgttcctgtgcagacagtggctgggcctggtgtttttcayaatctgtttccagtgtcgggcctggcagtaactcattgtcgccttgtcaggagaattcgcacaaccacggggacggtgcagaggacttcaagcagcaggtgccgtataaagaggacaaaccccaggtgcccctggagtccgattccgtggaattcaacaacgccatcagctatgtgaataagattaaaacccgcttcctagaccacccagaaatctacaggtcattcctggagatcctgcacacgtaccaggtaagaactcagattacaattccttgtgggttttggatttcatccagtttggggccctgcagatattcagattttcttgtcggaattcataaaatcctgtaaaattctaattagttgtggggttttttgtttgttttttcttagagtctggctctgttacccaggctggagtgcagtggcacggactyggctcattgcaacctccacctcctgggctcaagccatcctccaacttcagcctcccaagtagcggaggctacttggggctagaacatgggcgcacatcaccacacctagctaatttttgtaatttttgtagagacagggttttgccatgttgctcaggctggtcttgaactcctgaactcaaacgacccatccacctcagcctcccaaagtgctgggattacaggtgtgagccaccgtgcccagccacctttttttttttttttttttgagacagggtcttgctctgtcacctaggctggagtgcagtggtgtaataatagctcactgcagccttgacctcctgggctcaagcgatcctcctgcctcagccctccaagtagctgggagtacaggtgtgtgtcaccacacctggccaagacagtctttttatcagatgactttgttattgcttaggcaatacggccatcctttactttgctgattacaactgggcccagcaccaggagctggggctacagagacaaatggctgctcctgcttagctgttcattgcagtggtgggaagaaactcagaggtggattggggtggaaaagaaaggatgtgggcaggagaggtgagtcagggttaatatgattcccagcccggttcccaacccgtccggggccagggaggggacagtcaggttgaatcttgacatatcagtcggaaccagtaggcaggttagcctggaggaagggtggacattcttggtgccaggaatggcctgtgcaaaggtccagagaccagagcagacagcggcatcagggcgtctgcaggggacttgggcaatgcaggtgggctggtggcgagggacatctgtgtcgtgagtggggcttagacgtcctcttcacccagacgtggagtctctaacrcttggaattttttttagcagcagaacccattttttttcttttttttgaaacagaatcttgcgctgtcacccaggctggagtgcagtggctcaatctcagctcactgcaacctcagcctcccggcttcaaacaattctcctgcctcagcctcctgagcagctgggactacaggcatgggccaccacgcccagctaattagcagaacccattttttaaaatgaaatccctgcagccttgacatgtcgagtcaagaagcgggattcttttcagcataagcgtttcagatcaaatggatagaatttgtgttctgggaactccacagcatttgttgtccaccgtgctggcatcatcatgggccttagcatctgtgagaggctggtacagccctaagaacgcttgtttgtcatggatgagtggttgccagtggctgctgtgagcatctggtctgtgtggagggatgtgcttgtgatcgtagaatctgtgggcccctcccaggctttgtggggtcatcacatttaggaaggcgcatcagagcagtctgtgcagtggctctgttctgtggcaaaggaaggggcaggttaaagacactagagatgaatttagacaaggtcacaatgaggggttgccacagactccttcagagagagtgccatgggaagggacaacgcagtatcccccaacccaaaccgggctgctgagagttggttgagaatgcagacacctggccaccatgcaggattcccattcatcagggcccgcccggcatcggcacagtttctttkytgtttttattttttgagactgggtctcactgttgcccaggctggagtgcagcggcatcatcacagctcactgcagcctctacttctctgggctcaagcaatcctcccacctcagcctcctgagtgactgggactacaggcrctcactccgacgcccagctaagggctaagaggagacggggtttcaccatgttgcccaggtgggtcttggaactcctggcctcaagtgatccacccacctcagccccccaaagtactgggattacaggcgtgggccaccatacccagctggatggcatctgcattttaaacaaggcccctggtgactccagcctcaggttgtctagttttttcaaatgtaagtttgaactgttgtgtaaattatcctggttttagaatgttggttcagatatttcagggatactgttagagccaaaccaggcagctccagggtccatctggccgtgtgttactgtttctccatctttgtggggctttccttcagactttctctctgccaccttctccctcggggttcttatccgtaaaatggccacaaaactggtggtgccaatgagcctgggttcagtgaggttaactgagcaaccagttcaggcacaagcctgcctcaggtcacccctgggtaactgtcacccattacacagccacgtatgcatgtcctgtgtgtgctgggatgaacagttagtcctgccctaacataagtgggaccctaaaaacgagctccctctgcagagttgcaaagtgtgatgggaactgcaggttcatgggaaacagactcagggtatgacattcaaaaacttcctcagggacacctagaaaaagataggcaccgactctaaacagcagcgccgttacgcgcatattaagtggccgagaattacatgaatgccacagcaaatcgggtactgaccttggaagagacctgaggctggtttgtggatctggtggcagcctgtgaattatgtgaaggccgggaggaggtcatctgaaatcagacaggtcattgtggcctcagatggggacagggctggcccctagcacaggggaaygctgagagagtgcatggacatgggagggggtgctggcgtggttttgcatactcccacggggttctggtcagccgggagcagtttctgcattcacctggtgtttctcctgcacaaaatagaagagaagcaaacagaaaattcacctcatgctcaaattattcccagtacttgtatctcatttagacagacatcttgttcaaaataagcattctagcagaactgactgtctctgcagcatgaatttccagaaactacttccctaagttgagggcgtactatgcattcatagagatcactcaatttccttctaaaaggtggtaccaatttgtctttctgccttccgtgtttgattgtttgtttgtttgttttttgagacggagtctctttcacccaggctggagtgcagtggcgcaatctcgtctcactgcagcctccgcctcctgggctcaagcaattctcctgcttcaacctcccgagtagctgggactacaggcacgcgcccccacacccgggtaatttttgtatttttagtagagatagggtttcaccatcttggctaggctggtcttgaactcctgacctcaggtgatccgcctaccttggcctcccaaagtgctgggattacaggcstgagctaccgcacctggccttgccttctgtgtttgagagcacctgctccccacaccctcatcggaaatcctagcctcttctgtctgtgtagtcagatgagcagagatggctgtggcactgttttaaattgtttctttaaacatcagtcaatttggtcattgtttcttttcttctttatttattttagataggatcttgctctgttgcctaggctggagtatgcactatcatgatggtagctcactgcagccttgagctcctgggctcaagcaatcctcttgcctcagccttccaagtaactaggaccacaggagtgtgtcaccatgcctacataatgtttaaaacaaatttttttaatcatttctcagcattttggctaagatcaagtgtaaaattttttgtagcgatagggtctcactgtattgcccaggctggtcttgaactcttggactgaagccagtctcctgcctcggcctcccaaagtgctgggattacaggcatgagccatcatgcccagcctaaattgtttctttaaacttcactcagtgtggtcgttgttctgtccgtatgcagatagatcatttctatttattatctgaactgagtggcctttgcttgtttttaagttttgctttttagtgtcttttgatgactttttggaagggtggtgttttttttcccctgcagtgtaggtgctgccggtgccaagatttaaaacttgcttcccttcccacaggctgcagcgggtgcagaggggcaggaggcgccagcacagggattcctcctgctttgcagccgtgcagtgggactctggaagccacgccatattatccgggaggctccggtgctattgcctcttgttctgtgacactcttgggtgtaaaattgatacggacgtatttctaacagccacggcggttttgctggcccgttcctgccttccaacctgggttccctttggtcctcttgttgctttaaggtctggatcaggccattttccttgggtctcagtgactccgggccagtaggtgcctcggcctggaagtcccttcccttcatggcccagcgctccccagttctacactccccatttcccttgggaaggcctggggttcgcccctgaccttgtacttccccggcccacccctgattacagccagcctgtcacctccctgccccctctgttcgtggacactgctgggtccccaccatactcctggacgggacctgcccatggccggggctcaggccatgctgggcagcaagatccacamgtgtgcagacaggaccctgcgggcaggtgctctttcctgagagtcatcctgtccccttcacggagggctgcctgagtgtcccggcccagggcacagcactccttgactaacgacttattttccctttcctgaaaactggcagaaggagcagctgaacacgaggggccggccattccgaggcatgtctgaagaggaggtgttcaccgaggtggccaacctcttccggggccaggaggacctgctctcagagtttggacagttcctgcccgaagccaagcggtctctggtgagtgccgagagcccctgcccagcctcgggggcctcagcgaggayggagggccccagccagcttgacccatgtccgggccaagcctatgtaccctccaggccacactagggtcccccagaagctacgcaggttgcagatacccaggggttcctcactgtaggctccacctgcacagcaagctcgtaaacgatttgccaaggtgcttctctgtacagacagtacctggatcttggggtggtttgggaggcagagagcatcttccagtggagactatgggcccaggggttccacctcctgtgtctgccctgcagagccccaccctgcctgggaccccagccctgtgggaaggtgcaggagggctgggtccacaatcatcgcttcccctgttggatgagactgatctggggctccagcaggttggatctggaggagccagtagcgggggtggcctgtggcctggccctgaccatggtggtagagagcagagatgggcgaggaggggccttagacagggctcagggctcaccctgcacagtcagcctttctcccctgcctgtggcctgaagctgccagggccgcctgttccgattcctcttttttcccccactatgatcataagacttttttaaaaattgaagtgaaatttatgtaacatcgaattcaccattgaaagtgaacaattccatggcatgtggtacatcctcagtgttgtacaaccttcaccactacctagttccagaacattttcatccccctgaaaggagacccagtccccatcagcagccaccccattcacctcccccagctcctggcaacgcccatgtgcttcctgtttctgtggatttgattcgcccattctggacatttcagatgggtggaatgtcaccatatgtggcctttgtgtctggctcctctcactcagcatcatgttttcaaggttyatccatgtcgtaccgtggatcagtgctcattccttttcctggctgaatcatattctgttagatggatgagccacattctgtttatccgtattctgttgatggacatttgggttgtttctgccttttggctgttgtgaacagtgccgccatcaacatttattgcacggatttgtttgaacacctgttttcagttcttttgggtagacacctaggagtggaattcctgggtcacatgttaattctgtttttgactttttgaagagcctctaaactgttttctacagtgaccgcaccattttacattcctatcagcartggactgcggtttctgtctctccacatsttggccaacatttgttcttttccaggtttttttttttttttttttgccttttgtttttagtagccatcagtgtgtgaagttttattgcattaaggtttgtttgtttttattttttgagacaggctctctgtctgtcacctaggctggagtgcagtggcgtaattgatcactgttcactgcaacctccatctcccaggctcaggtgatcctcccacctcagcctcctgagtagctgggactacagacaccaccacgatgccaggccaatttttgtattttttgtagagacagggcttcgccatgttgcccaggctggtctcgagctcctggcctcaagcgatccacctgcctcagtctcccaaagtgctgggattacaggtgtgagccactgcgcccggcctacttttattttttaattgtagagacagggtctcacaatgttgtccaggttggtctcagactcctggcctcaagcgatcctcccaccttggcctcccaaagtgttaggattacaagcatatgccattgtgcccagtccatggtttctttaagtggcatttatgcagggcacccggctagctcagtcagtagagcatgagactctcaaataacatttattaccaatttagctaagatttttagtgtgtattggtttattagagctatcttgtatatttagaaagattggatcaactttttaaaattattaaaagcactgcatctgttgtgtgaagtataatctttatgttaacttttggacatatattaaaactgtaggaaaaagaaaccaagatgaaatttggcattgctctaattaaatttgactggcctggatcagaggttgacaaaccttctctacaaagggccagatagtaagtatcacaggctttgcaggccagttgatctttgtgtaaagattcacctctgccctagtagcttgaaagcagtcatggaatatgtatgtcaatgactggacagggctgtgtgccaataacactttatttacaaaatgaatgggtgtggccgggtaccaacaaaactttatttacaaaatgaatgggcatgactgggtaccaataactttacaaaaggaatgggtgtggctaggtgctgataaaaaattttatttatgagaacaacaggccctgtgttaatttgccattccctagcctaggtggtctttgggggtccatctagctcagatgttcacataattgggagattaactgaaaagcaagaaccatgtgaactgttggggaagatctgctatacctgcttggtgagcttggctggacgcatggcgggtttcccctccaggtcccctgttcttgttcagcatttgtcatatggtcgcccagctgcatcttttgggaatcagtttacacctgttccagcatatacaaaaaatagccaagcgtggtggctcgtgcctgtaatcccagctacatagaaggctgargcaagagaatcacttgaacccaggagacggaggttgcactgagctgagatcgcaccattgcgctccagcctgggtgacagagtgagacctccgtctcaaaaaaaaaaaaaaaaagatgtaccagtggagaattgtgtagatgccaatttctccacttacagctctcgaaatagccttgaattttgggtaattattccccccaaataattccccccaaaactcaaatagccttgagttttggtaattattccccccaaattattcttctaagtcttaactgtggctaaataataagtcttttttagtagtagtagtagtattgtggctaaataatgtctttattattattatggtaaaaatagtatacactaatgaaaaaataagtattagcaagagtatcaaatttttaatgcaaacttcctctcccttgactcagttcttagtcattcttctcagaggttagcacttctaagtgtcttgtatatctttccagaaatttcctctgcatgtgtaacaaatactttttacaaagcgacacacggcatcctatttgttctgccccttgggtttttggggtttttccttgtttttttttgtttgtttgttttatttcaggtatgcctgtccctaacagcagcccagagccagcccatagtatctgatcgctgcgggctgatttgttcagatgcaccatgacttgtccatctcacccacactttaggtctttgggggtgtctttgcatccaggtcctgtggtggcaggggaaggcggagtacgatggaggtgaccgcagtggcacagaacgttgtagggcctctccagctctgcccacgtcctgcagaaaagctgcggtctgtccatcgtcccctgcctgtccagccttccagtatgttcatagtagactgttgcagaacagttctttgtaaatgtcattggcaccctgtaggcaccctgctcgggacaagcatcctcgacctgttagccgatggctggagcctgggaggcaggccccgaaccagccacgagccccactctgctcccagcaagtgacgacatcatcccccagaaacgttttgtcattcatagaaaagacttcaaaacctggccccaaggcccccaccagtgccctggcaaacatcagccacttccccttgctgcctgtttctctgtccactgcaccttgtgtttctgtggtgcyggcatgcacacggcgagatgccccaccagtggccgccacatgagcccccgcacgggaagacccaactcagctgtctccctcctgaaacccccagcccttctccctcccttatccataaaggcctcacaggagctttctcccagcctggcagtgttagtctgtgatgattcggttaccttggaatgtgagcatcttgctggagtcacctcacgcatggacggagcatctggcctggtgcccgtggccaccattgcccaccgggctgtgggctgagctggaagcagctctgcatgctcaggtgcatgggtccagccacgtctccggtgctgaccacctcccacatgtgtccttagttcacaggaaacgggccgtgcgagatgcacagcgtgcagaagaacgagcacgacaagaccccggagcacagcaggaagcgctcccggccctcgctcctccgccccgtgtctgcacccgccaaggtacctgtgagccacatgcagccatgcctgcacgcggggcccccagcaaatcgggccttcccagcatgtgaccagggaacagaggccccagcaggggttcggggctggaccgggggctgtgtgaggttcaccggcagtgggaccgttggaagtcagctctcctctaaggtggctgttcttccgttctccctgtcctgtgagattgttttgaaaaggaggaggaggaaggagtgttaaccctgccctaggtcccaagaaacagggtgtaccacccagtctccttttcaccctcaggactctctcacaggcaaggccgccatgtacgtttgttcaggttggtcactgcacagctgagggcagagaggggctgggatccagctcctgtcacgcctttcacctgcaatggtggttttccgattccattattccttgtgcagttactacttggctttctactattggtgggaactttgtcgtcctcccatttatttagttatgtatattagatatggactctgggttataatccattctagtgttgatgtccatactgttccagattgggccagcggggtccctttggctcttgtgtcctttttttctttcctttgagacagagtctcgctctgtcacccaggctggagtgcagtggcgcgatctcggctcactgcaagctccgcctcccgggttcacgccattgtcctgcctcagccttcctgtgtccttttggcatgtcctcatcattctttctcctgtggggggatggggtttcactctgccacctaggctggagtgcagtggcacagtcagccttgacctctgggctctagctgtcctctcacctcagccttccaagtagctgggaccacaggtgtgcaccaccacacctttttgtagagatgaggtttcatcrtgttgcccaggctggtctcgaactcctgggctcaaacaatcctcccgcctcagcctcccaaagtgttgggattacaggcgtgagtccctgcacccagctcatcctcattcttcaggcactttggagatagttctggatggacagtgttgtccttcttgccatgatcgtgcatccaagttcaggtccaagtccagcttagagacaaaagcctgcagagactcaacatttggcttctccagggtcttcccagtgccaccctcttcctgtccgcttcttgttgctgtcttggctctcagracaaaacagggaaaggattctgagattgtcgtagccaggggcacatcccccttgcctttctgatgctgtggcactcttgcctgttacccaaagccctaccctgctgagatggagatcccagatttggcagtggcaggtatccccagaggtgtcatctcaggggtcctgggtaactgagcggctcctgcctgtccctcactgagcatctcatggcagttcccaaaggagagcacggtcttagccttcttgagactctgtgacagcgatggacagaggccaccggtgggaggcacagtgttaactgcatagaatttctccccacagaaaaaaatgaaacttcgtggtaccaaagacctgtccatcgctgcagtggggaagtacgggactctgcaggaattttctttctttgacaaggtgagggtgggccctggcttccatcttggggatgccatgtccagctggctgggccaatgctccctgggcctgccccaggattggggcggggagcaggtagggtgggtgcagtctgaggatggatccggcggggctggcccccagctttcactgcggaagggaatgtgggcctccttggagcccaggcatatactgtgggcaggagtcccagtgggtgctgagactccaagcagagtatgaagacatacatgtctgccaccctgcagctgtgtggctttttcttatatcagggatgattgtagggttcccgcccagggtctgtgggcagagcagacaaggtggccgtgtgcatgggctgtgaattgctgcatggattgcatgcacagactgtgaattgctgcatggatcacgtgcacgggctgtgtgaattgctgcatggacacatgcatggactgtgtgaattgctgcacagatggcatgcatgggctgtgaattgctgcatggattgcgtgcatgggctgtgtgaattgctgcacggatcgcgtgcacgggctgcgtgaattgcacggatcacatgcacgaactgaattgctgcatggacgcgtgcaggggctgtgtgaattgcacggatcgcatgcacaaactgtgaattgctgcatggacgcgtgcagggactgtgtgaattgctgcacagatggcgtgcatgggctgtgaattgctgcatggatcacgtgcctgtgctgtgtgaattgctacacagattatgtgcacgggctgtgaattgctgcatggatcacctgcacaggccgtgaattggtgcatggattgcgtgcatgggctgtgtgaattgcagcacagatatcatttacttatagacacagttggttcccatatcgcacacccatgtggctgacctacaagtgagccaggcccagaggctgaggagcaggggttcacagtggtccctgactgctctctctgcaggtccgccgggtgctgaagagccaggaggtgtatgaaaacttcctccgctgcatcgcactcttcaaccaggagctggtgtctggctctgagctcctgcagctcgtcagcccatttctggggtgagcagctgacttcccagggctccctaggggggttctgttcctgtcaactccatctacttggtttttagttactgtttttgagcaatgattgtgcttttctaaaatcctgtttattaattgacgtgattgatawaattattgattcccatgcatttgtaaggagcaatacaccacctgggtaccctccagctggttcctttaccagtaacatctgtagtcagtatcctcaccagaatacagtgggtcctcgagtaatgccttttcatttaacactgttttaacaccgatgagaaaagaagacattcatttctggtctgagtggagtttgcacgttctccccatgtctgcgtggattttctcccacatcccaaagatgtgcatgttaggttaagtctaggttaagcggtgagtctccgtggtcccagcctgagtgagtgtggcggggtgagcgccctgcagtggggtggcgtcctgtccagggtgggtgccccactggtgctctgagctgctgggatagggtccggccacccaagatcctgaactggaataattgggtaaattgttattttacttgtttttactcatctttcttatctgtatgtgtggcttgcatttatttcagtgtttaatattagaagtgttttggtctctctttagaaatttggtgattgttttgtgaccaaaaatacgccgtaggaacgtcattcttgtttatgtgtcaattagcttgtggcaaaattggttttgttacacatcttttcaacttaaagacacagctttctaacacctgttgatgatgttgagtgaggacttactgtactgactctcacacaacccccgttctttccagactctccgtgttcctcatacacgtctggtgtgtgtgtttttatacagctttctcactgtggagggttgtgcgtccgccacagtgaagatactgaacggctccaggactgtcaagttctggccttgaccttttatctccatcccaaaaccctgcctyagccggagtctgttccaaacccctggcaactacttatctgttctctagacaatgttacagtaatggaactgtacaggaggaaccctctgggagaaaccttccccccccsccccccagcaaaattccctggagattcacctgataaatacttttaaaaattctaacacttgggccgggtgcggtggctcgtgtgtaatcccagcactttgggaggccgaggtgagcagattgcctgaggtcaggagttggagacaagcctggccaacatggtggaactccatctctactaaaaatacaaaaattagccgggcgtggtggcaggcgcctgtaatcccagctacttgggaggctgaggcaggagaatcgcttgaacccaggaggcggaggttgcagtgagctgagatcacgccattgtactccagcctgggtggcgacaagagcaagactttgtctcaaaaacaaaacaaaacaaaaaaataattctaacccttgggtcgggcttgggttaggtgcggtggctcacacctgtaatcccaacactttgggaggccgaggtgggtggatcacttgatgtcaggaattagagaccagtctgggcaacatggccaaaccctgtctctaccaaaaaatataaaaattcgccgggggtggtggcacacgcctgttgtcccagctacttaggaggctgagctagaaggatagcttgagccagggaggtcaaggctgcagtgagctgtgatcacgccactgtcctctagcctgggtgacagagtgagaccctgtatccaaaaaatatatgtatatatattatacctctgctgcacaaagagaagcctcattagcaggtcaggtctaagagtagcttctaacctctggtggccaggtcagcctcaggaaggggctgggactgagtggaggggcctggaaacaactgcgcacactcgtatccattctcgggctcacaggagtgtgcgcggtaggagtaggcgggcctgtgagtgctgagacctgggagccagctggggccagtgttgcttcctgcacatcagccctgtgactagggtgagtcacttgggcagtctgagcctctgtttccttgctgtaaaatggggatagtaaatgtaccgacctatgtggggttcctgagagctgcaggtgggcgctacytgcagggcccttcaaatacaatagaatctcacaaataaaaggaaaagacgattttttcggcagaaggaaatgatgtaagtcacaaacttggatctttcctaaagaatcgaagagcatggagaaaaatacacgtgaagatttttttttttttcaagacagagtcttgctctgttgcccaggctggagtgcagtggcgcgatcttggctcactgcaacctccacctcccaggttcaagtgactctcctgcctcatcctcctgagtagctgggattacagatgtgtgccaccatacttggctaatttttgtatttttagtagagatggggttttgccatgttggccaggctggtctcgaactcctgacctcaagcagtctgcctgcctcagtctcccaacgtgctgagattatgggcgtgagccaccatgcctggccatgattcttttttttaatggttcttgcacatggtgggtgcacatattaacatgatyagtccattcagtccttagcccttttcccatttaccccagggatagtagttgacagcacttgtggctgtagcgttcaccccaagataactttgccatgaagcatctcatttttattattatttttgcattgctgtcatatatcaactttggaaataaaagacatcattttatgtatagcatcctgtttttagtagtgatatttccagttacaaaatatagtaattcttgatcactgaaaatgtcaaatcttggaaaatgtagcattcctacacttgatgttaacattgttctcaaacagttgttggccaaagattcatttgatgaatctgactgttccaaaatagacgattctggtgattcagacgattctgatgttctgtttagaaataactccaagaacagtttttatattttactttcacattgaaaatcagtcagatttgcttcagcctcaaagagtgtgtttatgtaaaattaaatgagcgctggcagcaagctggacttttttttttgttctaaatgggaaaaagttgaatcaaccctggggacaggtgctgtgtgagcccttttgcattaacttaaaaaaaatatgtgtgtgtgtgtgtgtgtgtgtgtgtgtgtgtgtgtrtatatwcacataaacatttttctaatgtaaaataaagcacagatccaagaaaccacatggccaacaaatggcttgaatctttattaagcagtcacccatgtgcccaccacccacatcaaaaatagactccaggagcacccccgcataccattccagtccctgcccctcactgtgagagtgtcctgacttcaggagtgaccgccacctgcactaatgacggcacagccacccaggtgggcatcgccaaatacatgactcagtctcacccccatctgggttgggtttgctttgctttgcttcttttctcttctcttttcttttcttttcttttctttttttgagacggagtctaactctgtcacccaggctggagtgcaatggtgcgatctcagctcactgcaacctctgtctcccaggttcaagtgattatcctgcctcagcctctcgagtagctgggactacaggtgcctgtgaccacacccagctactttttgtattttgagtagagacagagtttcgccatgttggtcaggctggtctcaaactcctggcctcaagtgatccgcctgcctcagcstctcaaaatgctgggattgcaagtgtgagccacggcgcccaggccctgggttttgttttctaatacatctcgtaagtctcctttcacctctgattccctccgattctagtccttactatttttgtcctgatgcccctctgcctatccctgtccctgttatttctgtgatattagcctcccaggtttgctcattcatttggggttacacaggaggatcaccacagcatttctcaccttttataagaagtggcccaggatagctgcttgattacagccttgattcctccctagtcacggcctcagagtgatgaactgctttcatatcatcttcccaaggggaccaattaggttgtttcctttgtttttttttagcatcttaatgaattcatggacttaaaatatatttgatgcgtttcaataccgtttctagtccttttaaaggtgaggggccaggcrtggtggctcatgcctataatcccagtactttgggaggccgagggggaaggatcacttgcatccaggagtttaagaccaaggccgggcctggtggctcacgcctgtaatcctagcactatgggaggctgaggcgggtggatcacctgaggtcaggagttcaagaccagcgtaaccaatatggtgaaaccccttctctactaaaaataaaaaaattagccagacatggtgacctgtgcctgtagtcccagctacttgggaggctgagacaggagaattgattgaacccaggaagcmgaggttgcaatgagcaaagattgtaccactrcactctagcctgggcaacagagcaagctgtctcaaaamaacgaaaacaaaaaaaaatgaccagcctgggcaacatagtgagacctcgtcagaaactagccagaagtggtggcgtgtacctgtacctacttyggaggttgaggtggctggatcgcttgagttttcgaggcagaggttgcagtgagccctgatctcaccactgcactcagcctgggtaacagagtgagaacctgtctcaaaaaaaaataaggaagctgaggctcaggtcgaacccctctaacttactctaggacaagcactcataggtgagcttagcgtgctgttaggcggcagccagggtgctccagccccaaagccagccctttgcatgttctctgccttctgggcacagtggctgctgggcttcggtgtgtatttttttttttaactcagcatttcttggaagtgtttcagcatcagatgtgaacccatgtcctcatttttaagcaactgcaccgcttttccttcccttaccagggtctctaacaatggacatttgtctctagtcctccctgtaagtggtgttgacagcaaatgctcctgagtctgcgaccctcatgggtcaagctgagcccatcagaaggcctttccctggtggtctcaggcatgcacgtgttggggtgatcttttcagtgggttttctttcttgggctgctgaaggtctgtaaacgccctgaagaacagcccagagcaggatggtgttactctagtctcagccaaaacggggactcctggggtctgtttgtgacgtgggtggtgggcacacggctgggctttttctgtggatgtggaatgcacattcaccttgagttgcctccactgggcttagaatccagcactctctgagcctgggtcccacctgggaaaaggggcccccaggggctgtgtgtggagctggtgttggcacctgggtccagcgggcacgtgaccaccccgggttggaattgggactctgcttcctactagccaagcgagcctcagtgtctttgtaaaatggccatacctccctcctgggtttatcaggaggttagaggggaagacagaaggaacatgaaaggtgagaatctgaaaggcaaggtgctgaacagatgggcagtgccggagcacagtcagctgttcttgtttccatgtttcagcagtagagactcgtatggggaagggcgtttggggaagggtctgtatggagcaaggtccagaattgaagcgggcctctgcgtgtgcttgacacgaggcctggttgggttaggagcgttcaccaccatgtggcgttcctccgcgtgttcaacctgcggtcaagtgctcagctgggctgggcagctgaacacggcccagggaactgcccctcgcagctggcagccgcgtggcagccagggtggatcgggttgagcattcccttcagagcagtcacgatttgcgtttatcccagcagtagcctcaggcatctctgcagctttttygttggtctctttccttcctacgtttccatcggcttgtgggttttccttgtgagcagggttggcatagggttcttaaatacggggaacgacggagcccacatcaatgagggggacgtcgttatgcgagggtgggctgggtggctaggtcacagcaggattgtggcaccagcagtcaaagtaactgcaacttttttttttttttttttttttgagacggagtctcgctctgtcgcccaggctggagtgcagtggcgtgatctcggctcactgcaacctctgcctcctgggttcacgccattctcctgcctcagcctctccsagtagctgggactacaggcgcccgccaccacgcccagctaattttttttttgtatttttagtagagacggggtttcaccgtggtctcgatctcctgacctcgtgatccgcccgcctcggcctcccaaagttctgggattacaagcatgagccactgcgcctggccataactgcaacttttttggtaggatctgatgttactgcttagagacggggtcctgctctgttgcccaggctggtctcaaactcttgagctgaagtgatcttcccgccttggcctcctgagtagctgggattccaggtacacaccaccaggtctgatactattttaaacagaaatccaggtggcattgtagggtcatttgcattaaagccttcctgttgtcgaccacagccatgacattatgactttcaagcttgtgtccagagaggggttcacagagagaagtctccctcatgagaggaagactgtggatcagagataggcaaacttgatctctgaggggccagatgggctttgtggaaatgactcaaacccctcttgtgcaggcagccacaggcagtgcgtacacaagtggatgtgactgcaggccagtgaaactttatttacaatgggatggctaggcatggtggctcacgcctgtcaccccagtactttgggaggttgaggtgaaaggatcacttgaggccaggagttcaagaccagcttgggcaacatagcaagaccccatctctacaaaaaaatttttaaattggccctgcatggtggctcacacttgtaatcccagcactttgggaggccgaggcgggtgaatcaccggaggtcaggagtttgagaccagcctggccaacatggggaaaccccgtctctactaaacatacaaaaattagccgggcatggtggtgcatgcctgtagtcccagctactcagaaagctgagacaggagaattgcttgaacccgggaggtggaggttgaagtgagccgagattgtgccattgcaccccagcctgggcgacaagagtgaaactctgtctcaaaaaaaaaaaaaaaaaaaaatttagccgggtgtggtggcacatgcctgtggtcccagctactgaggaggctgcggtgggaggatctcttgagcccacgagtttgaggttgcagtaagctgagatcatgccactgcccttgagcctgggcaacagagtaagacactmtctctaaaaagaaaataccaaaccaaacaaaacacaggcagtgtgcagactggctgtggcttgccactccctggcctgaagcctggcctcttccagtcagggaacatcaggggttccagcttctgccagtttaagtcatcttttctggtgtatttcaaagccttactgtgagtatgggattaataggcacaggaagggacctggtgtgtgacagatgggtgggaggcccattcattcacacaccccgggacttgcagtgacttcctgtgtattggattcttccgcctctcattcgcatccatgatgttgaattctgactctgtttaacttgtaatgtccacatgaagccattctaaaatctccagatccctctcagaaggccctggggatgaccagttaccatgtgtctttatctttgaaggaaatttccagaactctttgcacagttcaagtccttcctgggggtaaaagagctgtccttcgcgccacccatgagcgacagatccggggacgggataagccgggaaattgattatgcatcctgcaagcgcataggatccagctaccgggcactccccaaaacctaccagcagcccaagtgcagtgggaggacagccatctgcaaggaggtagcgctccctggggctcaaatgttcgttgacatggtgcatcccccacccctccccagcaaacacccgatacccccgttatgaatgaaatgctgtgtgctcagccctcctgaatgttgggttatgggtggtgctgggatgtggcccggcaaaaccacctgagcagagacaacagtgttgtaccctgctggtagttttggcaaaacacagagtgccagggataacgtggagttcggcttattcatctgttatttgacttaggtttattgctgccatgattctgctctgtcccgggctcactgacctcagtgtgtttctgtttagcttgaccattggacacttctccagggttcgtggacagacgattactgcatgtccaagttcaagaatacctgctggattccaggatatagtgcaggggtcagcaaactctggcccacgggccctggcccgctgcccgtgtttgtaaataaagttttactgtcacacagacacaaccattcctttacatattgcctgtggctgcttttctcaccacaaaggcagagttgagtattcatctgggatggcctgcaaaatctgagatggttgctgtctgaccctttgcagagagaatttaccaatgtctgaaatgaaatcggccctccggatctgcaagttcctcatctgtggtttcaactaaccatggattgaaaatacgtggggaaagagaaaccaaaaaatgacaatacagcaataaagcgtaatccacattttaagaatgcagtgtaacaatgatctacacagcatttacattgcattaggtataagtattctagagatgattttgcataggatatatgcaaataggattccattggacatcagggacttgagtatctgtggatttgggtcttcaggggtggttctggaaccaatctcccaggataccaagggagtgtccacttgaccaaagtcatgtttttccttaaaaactttatgcaccttcccatttgtataaggcagttggtattatgtatcaggatggtattatgtatcttggtactttctacactggctaacagtaaatcttggctcctggggcatgcagcgtcattcacggcatttcctcttggtgcaggtactgaacgacacctgggtctccttcccttcctggtctgaggactccacrttcgtcagctccaagaagacaccgtacgaggagcagcttcaccgctgtgaggacgagcgcttcgaggtgtgtgtgctgctgtggccrggtcccccggcatgtgcctgttccccttctccatgggacatgcatcctgatcctcctccactgccccagtctcgtttggaggagcaggaattgcagcacattccaacagctcctggaagcttcctgcygggtcttgctggcctttgggctggctaccagatggcacttttctttctgtttaaaaattttgtttgggctgggcgtagtggcagacacctgtaatcccaacactttgggaggccaagacaggtggatcatttaagctcaggagtttgagaccagcctgggcaacatggcgaaaccccatctctaccaaaaatacaaaaattagccgggcgtggtggcgggcgcctgtaatcccagctactcgagaggcagaagcagtagaattgcttgagccagagaggccgaggctgcagtgagccgagatcacaccactgcactccaccctggacaacagaatgagaccctgtctcctaaaaagtttmtttaatgtaaaaattaaatttatttttattttatttatttatttattttgcttgctctgtttcccaggctggaagtgcagtggcgtaatcatggatcgctgcagccttgacctcccaggctcaaatgatcctcccacctcagcctcctgagtaactggaaccacaagtccatactaccatgcccaagttgttgttttttttactttttttgtagacatgaagtctcactgtgttcccgaggctggtctcacactcctggcctcaagcgatcctcccaccttggccttccaaagtgctgagattaaaggaatgagccaccacacctggctaatttttttttcctttttttagagacagggtctgtattgcccaggctacattaatttttgtaattaaaagttttattggctgggcacgatggctcacgcctgtaatccctgcactttgggaggctgaggtgggaggactgcttgaggccaggagttcaagaccaacctgggcaacaaagcaagagcccatctatacaaaaaaaaaatttttttttttttttgagacagagtttcactctgtcgcccaggctggagtccagtggcatgatcttggctcactgcaacctccacctcctgggttcaagcgattctcctgccttagcctcctgaatagctgggattacaggcacaccaccattcctggctaatttttttatttttagtagagacggggtttcactatgttggtcgggctggtctcgaactcgtgaccttgtgatccgcccatctcagcctcccaaagtgccaggattacaggcgtgagccaccgtgcccggccataaatttttttaattagccaggcatggtggtgcacacctatattcctagctacgtgggaggctaaggtgggaggattgtttgagcccaggaggttgaggctgcagtgagctttgattgtgccacagcactcaagtctgggtgacagagcaagaccctatctcttaaatacacacaccccccccccmaaaaaatcctctggtctctgaggtcccaggctcctctctgaggcctcttgagttccccagtggctgaccccgtcctgccttcctttccatagttagacgttgtcctggagacgaacctggccacaatccgtgtgttggaaagtgtgcagaagaagctrtcycggatggcgccggaagaccaggagaagttccggctggacgactccctgggaggcacgtcggaggtgatccagcgccgtgccatttatcgcatctatggcgacaaggccccggagatcatcgagagcctcaagaagaaccctgtcaccgctgtccccgttgtcctgaaaaggtgccctgtggcgtcccgacttcccttccccttccccttcccccttccctcccctcccctcccctcccctccccactgcagggagcccttggagagctcattagtgctgtttgtcaacaggtgtcatctccaggggtggtctctgaggcctaagggtgccttcctgtatttcccagtctcccactcctgagaggagagcactgtgaccttctaggactttccaccttgcacataatacatctagacatctaaataactgctttaagagtcagatgcgaccactacactgtggcttgcattttatttaatgctgcatttcggatgccgtccggcgctagttaacaggcatttatcaagtggtcactttcaggcaggtgcagtgcttggccctgggattatgcagctgagtgaggcagacccagtccctctcttgggactcacagctgagcaggggacctgagtggttgagccaacagccatgcggagagtgctgggtgccagggaggaggtggaggaaccgggaagccggccacattggctctgtaaggccatcacgccctccctctgacgtgcacagagcccactgcacagrctaggctgsgagctggctgggcctgggtcctggacccccagtcaagtcccagaggaagacaggccagccctgggatgcttcagggaggatgccctggcttgtccctggtgctgacctctcttccccccgcagactgaaggccaaggaagaggagtggcgggaggcccagcagggcttcaacaagatctggcgggagcagtatgagaaggcgtacctcaagtcccttgaccaccaggctgtgaacttcaagcagaacgacaccaaggccctgcgctccaagagcttgctcaacgagatcgagagcgtctacgacgaggtaaagccttccctagccctgccggccggtgggggtggggtcctggctctcccgaccgccgggtctgtgcctctgtttccctggtggttaggcagggtagtggcattgccctttcagggctgtgttgaggcgagggttcatgtctctgtgatgcccagcctgtggcctgccctaggagaaccagcaactctgccattgtctatctgtttgtttgtttggagacagagtctcgctgtgttacacaggctggagtgcagtggtgtgatctcagctcactgtaacctcagcctcctgggttcaagtgattcttctgcctcagcctcctgagtrgctgggactacaggcgcacaccaccacacccagctaatttttatatttttagtagagatgggttttcaccatgttggccaggctggtcttgaactcctgacctcgtgatccacccacctcagcctcccaaagtgctgggattacatgcgtaagccaccgctcctggccgactctgccattgtctagcgaagtctccgtccctcccgtggggcagtgatggactttggcttaggtagtgggtggcagcagccttcatttctttcttgccgactgtgccaggcaccggtgttagcaacacagaaagagtaatrcatcatctgacctcactcctgaacctgactctgctgcggcattattctgattttaccagtggggaaactgaggcacaagaggttgcatttgcctgggctggtcgcagggggccagggctctgagtcattgggttcgaggctttcggctgcatgtcctcactgcaggctcacaaggcctgagtcatagaaccaaggccagcggggccctcaggttgccaggagctgggcctgttagtagctgtgtgtagggagtgcctgcttgcaggatcctgaggtgggaagcttggcagggtgccgggcgtggtgatagccagctgtcgggaaggtccttggacactctgaggaggtggcttaggagggcacactactccccaggcagtgcccagatcatggcacgggctgcgttatcagcctggtgcccacctgggcagggggtgttgcctcacctgatttggtttcttgctcctgtcactgcacagtgagcggtcgctccttcttttacaacacagaaacggaatccacaggagccgggctgctggcccaaggcctctcccagagcctgtgggactgtggggacccccttccctcccacctcccttcccgtgggccaccctcgccccaggcccacccacaaccactctggcttcctcactctagtcctcggcgatcctcaagcccaagaccccgtataggttctgtgggtctgtggtgtctgcaaagtgcagatgatgaagtagccctggaaatccaccaatgcgaccctgagttcctggatccctccctggggctggggctgacaaagggaggggcaccaaggttcatatgcagatctctgcacatgcaggtccttgatgaattccaaagtcagaaccccattccatcacgtgatttacaaagcatggttacagatcatggacatggggaccctgcttcagaggggactgtaaaggaattttcagagtgtttatggcataaatgagacctgggggacttaggaagcagtcagagggcgatggtcacactgaagagcccagagcagggctgagcgtgcagactcctaggaaccaggtcagtgtgcttggccctaccagcctctaagccgccttgcaggggaggaggaagggaaacctcaggctgctaggagacccggtccttccctcgggagcctgcagagatggcatccacgctcattttccccaagagccctgctgcgtctgcctccctgccttggactgagggggttggggctgcccagcagaggccctgggtgccaggacagtggtgtgggaggctggaggaaggggtgattgtctaatggtgtgagggaatgaaagtcatgatctagataaagaccaaggggaggggtgagcctgggacagggttttccagggagtgagagcagatgggcatgtgcaaaggccctgcacacgcaggagggagcttggcgcggtgaggctggaggagctgtggaggggcacatcaggggccggcgtcttctgagcagcctgggaaagcctgaagggcattagttggggtgaccatgctcctgtgggccaagtcaccctggacccagtgaggagagtggttggagcaggctggtgggagctggtgggagggctggtgacatgatggtggtagcaagcacgtgcaggggctggcggggacagcagcggaggcgggggcttggtgacgatgggcgtgcaggtcttcagatgtgagcagttgcaggccttccgggtagtagatggagggcagaggcagagaggtcacggctcaccctttgcctccttgacttcatcgatagcatggtgtgggcagccccggtcgagctggaatcaggcgccaccgttgctttcagtaggaggaggtcagcctcagaggcttctccatgctgagccacggggccccgttctgtcctggagctgggctgagcgacagacccaggcttgacgctgtcagaccccctgtgaaccccgccccacatctcagaatcctcttggctcctttgtctggggtcccgggatgacttgggtctgcctcactttcggagaggggaccaggagcacatggggctgcacaagaggttgaggcaagcgacctaccccccaggccctgctgcctcaccgatgttcgccacccatcctgctctgggcagcgctcatccaccttggtggcccagttaacagcgagtcgtgaatgggcactgggggtcctctgggtgctgggtggctttccacctaatggccgcccttccccccacagcaccaggagcagcactcggagggccgcagtgccccctctagcgagccgcacctcatctttgtgtacgaggaccggcagatcctggaggacgcagcagcgctcatcagctactacgtgaagcggcagccggccatccagaaggaggaccagggcaccatccaccagctgctgcaccagttcgtgcccagcctcttcttctctcagcagctggacctgggcgcctccgaggagtcagctgatgaggaccgggacagcccccaggggcagaccacagaccccagtgagcggaagaagccggcgccaggaccccacagtagccccccagaggagaagggggccttcggggatgccccggccactgagcagccacccctgccgcccccagccccgcacaagcccctggacgatgtctacagcctattttttgccaacaacaactggtacttcttcctgcgcctgcaccagaccctgtgctccaggctgctgaagatctaccgccaggcgcagaagcagcttctggagtatcggaccgagaaggagcgggagaagctgctgtgtgagggccgcagggagaagggcagcgaccccgccatggagctgcggctgaagcagcccagtaaggctccaaagcctgccgngaggccccggsgggtgcctggggttaggggtcacagctcatgatctgacatgtcctgttacttttctttctggcttttcattttaagagaattctgtgatttcaaatgggaaattgcaaacaggaagttgccagcataagacagaggtctcacgtacccctcgcccaggctcccckggccgtggcacctgtcctgggtgtagcaccctctcctgactggggaacatttgtttctcatgggctttctcgtggagccgtcatggcccagctccacagtrccctttttctttctttttttttttttttgagatggagtcttgcgctgttgcgcaggctggagtatagtggcaggatctcggcccactgcaacctccacttcccaggttcaagtgattctcctgccttagcctcccaagtagctgggattacaggcgctcaccaccatgcctggctcattttttgtatttcttttttgaaatggagtcttgctctattgcccagcctggagcacagtggcatgatctcggctcactgcagcctccgcctcccaggttcaagcaattctctgcctcagcctctgagtagctgggattacaggcacccaccaccatgtccggttatttttttttgtatttttagtggagacgaggtttcaccatcttgaccaggctggtcttaaaactcctgaccttgtgatccacctgcctcgggcttccaaagtgatgggattacaggcatgagccaccgcgcccagcccaattttttgtatttttaatagagacaggatttcaccatgttggccaacctggtctcaaactcctgaactcaggtgatccgcctgcctcagcctccccaagtgctgggattacaggcatgggccaccatgcctggcctccacagcattctcgctgccatccctgggttgccggccagattaggcagcctcggagggtggcagtgaacaccagctactcgggtttcctggtgattcccacatttgccccaggggtggcaggtgagggctgttgggccccatgggggcatttgttggggctctgtcatgccagagtttggcctgcgtgactttgcgctctccaggaggcatatggatgaggcggtgtgtctccgcaggtgaagtggagctggaggagtactacccggccttcctggacatggtgcggagcctgctggagggcagcatcgaccccacgcagtacgaggacaccctacgygagatgttcaccatccatgcctacgtgggcttcaccatggacaagctggtgcagaacattgcgcggcaggtgagccgggccggggtggggccggccctgaggacggcggaaatggctctaccatcatttcactccccgctcgggagggggcccgtggtcagcacagcaaacctatcctgttttttcttaattgagacaaaattcgcataacgtaaaattaaccattttgaagtgtacagtttggtaacatttggtacattcacaatattgtgcaaccaccacctctgtctagttccagaacatttcatctttccaaaaggagaccccatccccatcagcagccactgcccattcccctgccccgagcccctgacatccagtcaactgctttctgcctctgtatttccctcgtgcttcattcctttttatggctctgtaatactccattgcgtgggtagctacgttttgtttctatctcttggtggacatctgggctgtggctgccttatagagattgtgagcaatgctgctctgaacatttgtgtacaagtttttgttccgtgtccctgttgacaaacctttcttgaggttaaattgacaacatggaaaaaaccttaacccacttatcctgagggagggtgggaatagtgatttcatctgcgttggttttagtagtagcaaaaacccagsccccactgaatgtcaacacaaggaaactggtcacgtaaatataaacagcagacgtcccagacgagctgggtgtggttccaggacatgggtcctgcctggtttctgccagaatcattgttcatggtgacctccatttcctggtcaccaagtaaggctgttcatcataaagtggaaaaaaagctggaaaaaaaataatgccattactctcccacccagacacagccacgagaagcatttcagacaggacgtttccttccaggttttaaagactgcttaatggagctaaaatacccaagcagaaaagtccccaaatttgaagggggcagatggatgggcttttcatcaacagaacccctgcccctgtgtccccacccagccacctgccacccatggacacccacaaccctgatttctttttcttcttcttctttttttttttttgagacagagttttgctcttgtctcccaggctggagtacaatggcacaatctctgctcacagcaacctctgcctcctggtttcaagcaattctcctgcctcagcctcctgagtagctgagattacaggtgygcaccaccacgcctggctaatttttgtatttttagtagagagggggtttcaccatgttgggcaggctggtctcgaactcctgacctcaggtgatccgcctcccttggcctcctaaagtgctgggattacaggcgtgagccaccgcaccggcatcacaaccctgatttctacagagaggtagatccctggcctcgagctgtgtgttaacagcagcacacagcgcccagccgcatcctgggagcgtcattctgtgagattcctgtgttgagatgaaccggccaaggattccgaggaacgacccccgattccgtccacctgtctcctgaggacaggcatgggcggtgccccgtgggtgtgtctgcggtggccgtctatgtacatttctgctgctgcccttggggtaaggcacagagaggtgtgtcccgctgatggcaactttccgtttcctgggtcactcgtaccagtgctgtgcgaggccgcactctgtgtcctccctggggctcaggggcgtctctccatcagctgggagttcaaatctcggtgggctcacgttgcatttccctgatggcaaatgtggctggggccctgtcctttcatgrccgttgggacatcttttctcatggaaagctatccacggtgtttgcgcctgtttccgttgcgtctgccttgttggtgactgggaggatttctgtgtctggccatgaggacttagtgaaacccatagctgcgttctgacaccttcgcttcagccccctccactttccctccgtgtgcccgaaatgggtccctgcccatcaccatccacagcagtggccactccccaggtgagggaaacacgcacggggcagcctggagagaggacacccagggcccagcacrtggtgttggggaagtgacgcaggggacgccrgggggctggcagtctgtcccctcccccccccccaggctgggcacccctcatgggccatggcttcggggacagcaaccttgcttgtgacaccaggagattggaccagatggtttatggaaagcattgattaatgctttaaaaaaatcccccccttccataaacaactcctctagaacctgttaaaaacaaagcaatgaaaatggggctgtctggctggagctgtagtgagagccacatgctgccctgctgtcccagctgtggctgcaccacaccccagctgcatctccctgggccaggtgctcactgcgggcccctccacactgtttgtaacctgcctcgaggccatgtctggactctgcctccctttttcttaaaaattagcattgctgttttttagcagtagcagttggcattcagtgggcacttgctgtgtgccaggtactgtctgaaacctatgcgtgtccaggtgttattgtatccattcaacaaagctgcacatggaacccccaaggagtgtggtcccctgaccagggcctgggctgtgcaggcgggtgattcacacagccctgtctgccccacgatccctgctgtttccattccttccttcttcagtgcaaaggtaaaaggagtagcagtgtatttacagccaagcatttaggggaaaggaacagcctgcactcaggccaccttcagctcattcctgggtttgctttggaacatwtttttccgtgtcttttctgtgtgtttctcacacccgggcagggtttgctggtctggcctggtctgttttgttcaggtctggtctggtctagttttggtctggtctggtctggtctagttttggtctggcctggtctggtctggtttggttttggtttggtctggtttggtctggtctggtctggctttggtctgatttggtttggttttggtttggtctgatttggtctggtctggttttggtctggtctcatctggtctggtgtggtttggttttgatttggtctgatttggtctgctctgatctggtctggtctggtctggtttggtttggttttgatttggtctgatttggtctggtctggtttggtgtggttttggtttggtctggtctggtctggttttggtctggtctggtctgatctgatctggcctggtttggtttggttttggtttggtctgatctggtctgtttggtctggtttggtttggttttagtctggtctggtctggttttggtatggtctaatctggtctagtttggttggttttggtttggtctggtttggtgtggtttggtctgatctgatctggtctggttttggtctggtctgatttgatttggtctggtttggtttggttttagtctggtctagtctggtctggtctggttttggtctggtctaatctggtctagtttggttggttttggtttggtctgatctgatctggtctggttttggtctggtctgatttgatttggtctggtttggtttggtttggttaggttttggtttggtctggtttggtctggtctggtctggttttggtctggtttggtttggttttggtttggtctggtctggtttagtttggtctgatctggtctggtctggtttggttttggtttggtctggtctggttttggtctggtttgggtctggtctggtctggtctgtttggtctggtctggtctggtctggtctgtctggtctggtttggtctggtctggtctggtctgtttggtctggtctggtctggttttggtctggtttgggtctggtctggtctggttttggtctggtttgggtctggtctggtttgggtctggtctggtttggtctggtctggtctgtttggtctggtctggtttggtctggtctggtctgtttggtctggtctggtttggtctggtctggtctgtttggtctggtctggttttggtctggtttgggtctggtctggtctggttttggtctggtttgggtctggtctggtttggtctggtctggtctgtttggtctggtctggtctgtttggtctggtctgtttggtctggtctggtctggtctggtctggtttggttttggtttggtctggtctggttttggtctggtttgggtctggtctggtctggtctgtttggtctggtctggtctggtctgtttggtctggtctggtctggtctggtctggtcggttcggtctggtctggtctggtttggtctggtctggtcggtttggtctggtctggtctgtttggtctggtctgtttggtctggtctggtctggtctggtctggtctgtttggtctggtctggtctgtttggtttggtctggtctggtctggtctgtttggtctggtctggtctggtctggtctggtctgtttggtctggtctgcccacagcctgtcaggattctggtctcttcatccctgtgtcatgcactctccatcctgatgtgtttctggcctttgtcgacttcctctgtgggtgaggtggggactcccgcaggaggcggggtggccgcaccacctgctttcctcccgccagctgcaccacctcgtgagcgatgacgtctgcctgaaggtggtggagctctacctgaacgagaagaagcggggtgccgctggtgggaacctgtcctcccgctgcgtccgcgctgctagggagaccagctaccagtggaaggctgagcgctgcatggccgacgagaactgcttcaaggtgagaggaggcctggggctgggaacacgccgggaggcccggccgctcactccrctctggactcagtcctgggtggaccctggttcagcggctgggacaccggccctgctgcagagcccatgaggtacctttgacctgcaggaagcatcagggctttgggagggtggcaaaggcgggaggcgggtggccttgcgagcctgcgctgtgccggctgggctgtgccggcagtggaggctgtcagcgttcctgctccgcaggtgatgttcctgcagcgcaaagggcaggtgatcatgaccatcgagctcctggacaccgaggaggcccagacggaggaccctgtggaggtccaggtgaggccctggccccagtctgtgccacgcataccagggagcgcctgagggcagcagcatggggctcccaccagccaagcgcaggccgygcagcatccagagaccctccctctgcaggccacaggctctccttgaggcctggtgggtggggttgcctccctccctgctyccccaccaggctctcttctgtgccccctctccaaagagcagaccactcctcctgagcaagcggttgtgtcccagggcaggaggggaaccaagccacctctccctggcccccgactcccactcagggcatcccgtggctgtgacctctgcacctcttgtgtcagggctgcatcctgttcctaatccccagcagaggagccacctgggcccagctcccagtcacaatttttgcggggacagatgtttcctgctcacctcccgcatcctggtgacagtgaggcattgacccgtgtgtgtccccagggtggtcattggggcctgcagctcccggcacctgccaacaggtccagtgtgtgtgcacattactcagctaggccaaccccattcatttcctggggctaccaccacaatgaccacaaaccacgtggcttcaaacaacagaagtctattccctcaacgtcctggaggtcagcagtccacaaccacagtgtgggccgggcggtgctcctgccaaaggctctggggcggatccttcctgctcttccagcttccgggggcttctggcgctcctcagctgtggcctggttgtgtgagtcccgctgtcactgggtcctctgtcaagagctatagtctgttggggtctccgtcagggatcagagtcctctgcagcggctctcctcatgctctggcagtggggggcacagaacccctgtgagctcctgaactcagagtccagagtaagagtggccatagccctgctgtaggggcatcacgggctgtgtctctccctgtccccagcacctggctcggtacgtggagcagtatgtggggaccgagggcgcgtccagctcgcccactgagggcttcctcctgaaacctgtgttcctgcagaggtaagrggccctgagatgcatgctcygttccttccttcctgggcccagggagtgtcccctttgtcctgacgggggctggaccatggcacactgtctgggagcacttagtaggtgcctgctgtgtgctgaggcaggccctgcccttttgaggcttgtggtttgcagtggagggattagtaaccccaggacggtgaggtgtaggaggggcaaggccaaccccacgatgcgtcagtgggtgaagagtgaatgcccggactggagggagacgctgccagagctggtggggccaggccagaggcgggtggctgtggcaggaccctggaccacctcaggtcrggctaggatggcacctatgggaccagtgggggctgctggtgggtgttcagatctgggggcatttcttgttgcttccatttgctttctgtggacccctgggaggtagcacatcttctgatggtcccaggcctgggggtttcccagcctgcaaatcctcctcccacaatgccgagagccagagtccattccacctcctttcgcccccaggaacctcaagaagttccgccgccggtggcagagcgagcaggcgcgggccctgcgcggtgaggccaggagctcctggaagcggctggtgggcgtggagagcgcctgcgacgtggactgccgcttcaagctcagcactcacaagatggtgttcatcgtgaactccgaggactacatgtaccgtcgcgggaccctctgccgggccaagcaggtgccaggggaggcctgggctgccccgacatgcccctcctsaccccaagtcctggggccctgggggtccagccctcagctgccctgacacccggcctcttcaacaggtgcagcccctggtcctgctccgccaccaccagcactttgaggagtggcacagccgctggctggaggacaatgtgacggtggaggcggctagcctggtgcaggactggctgatgggtgaggaggacgaggacatggtaccctgcaagacgctgtgtgagacagtgcacgtgcacggcctgcccgtgacccgctaccgcgtgcagtacagccgccgcccggcctcgccctgacccgccctcatgggcaccgggcaggcgcctcacagagcacagacgtgccctcggccttggtcgtgtcggggccgttttcttgaacgacgtgagaggcatctcccagcccctctgctgccggacagcgcactccagggcaggacgccgcccccgtggctcccggtctcctgtgggcctgctgtgtgccaaacctgagctacctgcacccgagccctggggctcagccccaccacaggggcgggtggacgtgctggccgaggaacaagcaatcatgtttgcgtccccgtccgtcacatgtgccaaatccctggcaggcagatggctcctgccccatattcttgccgtgtcttggaaaagtcacaggtgacagccctcctgaggcccacactttggagggggtccatgtccaagagaccctgacaaggaaggagttgagccctgggtaggcttgcttgaaaagtgagtccttccagaatattctcagagctgccagaaacatcatctgagggtttgggcatcagctctgcctggctggtgttcaggccctcagtcactttggaagtgagaagaacccttcagccaaacctttgggatcccattttgaagtccagagctggagcaggcgggcagtgccctgggagaccccgctctggataagacacccaaccccaactccagcagctggactctgggcccacaaggggagggaccccagccagtattccctcagagccggcacgaccctgctgtggggcggcgggcccagtcgtgttcctgcagtgggcaccctaggcgtatgtgtatacaygcacagatatttattcctttcgcttttagtggttgttatttctgtagcagccaagtcctgcggctccctggggctgagatctccctttgtggaactccgagagccgccctgacagtcccagccgccacccaaggagccccatccgcccacccaccctgggacccacgcggccactccagggatcattgttgtccttttgtgaggggctgaggcgactgtcccatggaggcatccaaggctttctgtgccaagaatcccaagtgactggggctggggaccacttctccaggcctctctccccgaccatgagagcccctggccctggcccctgcacaccagtrggcccagaataaccgccacccttgccatcctgcaacagctggactcaagtttccaggaagtggagatgtgtttctagaagtttcctgtggaacctggaggctcctgaygcctttgactccaggctgggcgattccgatgctgacccgtcctcctgggctccccacccccgctccccaartgtcacacaggcactttgtacacatcctggttttctaagaagggaacttgccatcaagattcctgtaccaggcccacggccgtctcgggcagagccacctgggccccrggtgcagccggagaccccgccgagcccctcctcccagtattcccatccccgcatgcttytagggagcgcctcttttccgttcttgaggaatttctgttctggggcttgtccttcctttgcagctgttttgaatgtagttttccttttctatttatttgcacattaaagttaataattgaatattgacatcaagccgtgagggtgtgttgstcttcctgtgagagccttgctgacttcctgccaccaggtcagtgggctggacccatgagagcaaggggtggctgggtgtgcctacctgggaccaggggagtcraagcccctccttgaaccaagatcatctcacaccctgcacctgccccgccacgacatgggagtgtcttctagaatattctttccccattccatttgcacatttagtgggaattagaagcgtctccttcgcccgagtgtctctcatgcagaacccaatttaaagatcatggtgtttgctctaaggtgtttgttctaagcttcccatgcccaacctatccgtccaggcccatgcctgcccacccaccccacacgaccaccctctgtactccttggggccccacccacttcctggctttcaccatcattttctcytcatctcctgccccctgtctgcatcccaagctccacacctgcttccgggtagcagaagccccagctctgctgtgtcccctggctgacatacctggagggttccaaggcagaagtggccagcccctccccctcagtatgggctcctccatcctctgtaggggaggggccatagcttcctcccagtgacccatgtgctccctgtacacccaagcgtctctggcagttctgaccacacccccaccggagggtcagrgctcccagggagcgtggcaagccagaccggaggccgccctgtttccttctgccttgatcccatggctggggatgcccagggtcctctgtgggcccccagactggctttcyttggtcagaagtgctgcaggggctgggaaaggctgtgctggtcccaggagagcagacaaagagcagatctccgaggtggccctgccctgaggggtcccctgccctcaagtagggcccatggccttgatgaggtgatatgacatgagttgagagaggttcctcactggccctgaagatgtctccgctgtgctggggaggggaccctgtggcaagggacagagagtggcctccaagagccaagggggacctcagagccaccactaccaccrggacccaaattctgcccaagtccacttgggcccagaaaaggcccccgagcagcagataaggacacagcccagctgacaccttgatctcagcctcatttgaccctgaaccaaagacccagcctcccaggctggacccctgacccacggaaacaaaaggtcatagaggcgtgtggctgtgagccacattcattatccagagatagatacagcagcattaataaagccgctgcatgtccagcacctccccttccacctccgtcaagtacggggaggtggctgagggtctcaggaacccctactgaggggggaaatgaaagaaaaaagaaaaaattaaaaagagaattaagcttttcctgtattaggctgacttgtctcagaggcagcaacaggcacagcccagacccaggaaaagtcttaataatactaagaagccaagacacaaaggaatgtgctctggagcctctcccagcactccctcaacatagggagaagaaaaacaaattttcctttgtttcatggtatgagtttatagattcctgctctctacacctagtgacttcaaatattctgttttatcagcagtggagtgaaggtcataaactgtctgagcagcctgagatagagccacctgggtgccatagtgatggccatggaataagccatgctaagcactagggcaaacctacataatggccatctgagttgcacagcaacggtcatgtctaatcctgagttatgagcctgttataatttgattaactgtctttgtcctgcctctgtatccctgctttcacgccactgtaagcctgcttcaagctaacccacccctttttaaaagtgtgtttaagtcaagtgctgtctttattctaggcccagtttttagacgttgagtccrgtgggtctgagtgcactcaataaagatcctcctgtatacaccccaaggtctctcttttcctcctgtttccacaacactacatgtgatgctgacagagggtgctgggacaggggcttccagtggggccccatgaacatttattctgttgctagtgaggtgtttgtctcactggcttttgcaacatataaccagtgcttcccgcctgatgtcctcacttgctgagaatgaggctaactactccaaacagcaaactgaataccatccagcaatcacgttcctttgtatttgcccaaaggaactgaaaacttgggtccacacaaaaacctgcacaagagatatacgcagccttattcaccagtgcccaaactcagacacaaccaagrcgtccttcagcgggcaaacggataaaccatgtcacctccagacaacaggatataaaacgaaatgagccatgaagctgtgaagacatgaaggggccaggcgtggtggckcacacctataattccagcaccttgggaggctgaggcaggaggatcacctgaggtcaggagtttgagaccagcctggccaacatggtgaaaccctgtctgtcctgaaaatacaaaaattggtcaggcgtggtggcacgcgcctgtaatcccagctattccagaggctgaggcaggagaattgcttgaacctgggaggcagaggttgcagtgagccgagatcacgctactgcactccggcctgggtgacagagcgagagtctgtctcaaaaaataaaagacacaaaggggcctcaaatgcatctaactaagtgaaagaagccagcctggaaaggctgcacactgcrtgattccaactatagaacactctggaaaaggcaaaagtatagaggcagtgaaaagatctgtggttgccagggggcagatgggaggaagtaatccataggtggaggtgggaggatttttagggcagtgacrcaactgtgcgacactatggtcaatggtggacatatcatgacacatatgtccaaacccatggaaggtacagtgccaaaagtgaacccccatggaaacgcggggttccagaagacagagccgtgtccatgcagctttgtccrttgcaacaaaggcaccgcttttggtaaaggacatagatagcgggggaggcttgcatgtgtggggtggggttacatggggactctgtaccttctgctgaatttcactgtgaacctaaaactgctctaaaaaataaagttttttttaaaaaagcaatttgacccaaagtcagtctcaggaggccagggggtgggggacagaacaggccagggcaggaacttgcagggacgggtgcaggcaggctgaggtctcaggaatgtgtctgcacctctgtggtttcccttctcttcttcccttctggggacctttgcaatctgggctggctgctgggtcccgcctaggtttcagattctgccccaccctgaggttggccagtcccttctctctgtggctctgggagtggagcctcagcccttggtacagtggagcaaacaaactctgatttggggccccagagaggaagcgctgggaatccaggggttggacaggctggaccccaagccctgcttccaccatggctgtccgtgcgaccctgggagtgactgtcagtcctggtgagacagggtcacagcacctgcctctcatggccattcaactgggttaatgtccctgcccagccagggaatgagaggaggtggcaccatgtttgctgctggagtgtaatggcgcgatcttggctcactgcaayctccacctcccgggttcaagcgattctcctgtctcagcctcctgagtaactgggattactggcacgcaccaccacgcccagctaatttttgtatttttagtagagacagggtttcatcaaattggtcaagctggtcttgaactcccaacctcaggcgatccgcctgcctcggcctcccaaactgctgggattacaggcatgagccaccgcacccagcctgcccatgtggcttctaacttgttccctgaccctgaccttttgctggaggcagtgaaggcaggagagagtggaggccacatccaggagcttccagggacctgaggggttggaggacaatgaaatccaggacacgccactgacttgcgcctgtctgccaatttttccccatttaaaaaagttatttaaagggccaggtgcagtggcttacacctgtaatcccagcactttgggaggctgaggcaggcggctcgcctgaggccagaagttcgaggtggtgaaactccacctctactaaaaatacaaaaattagccgggtgtggtggcatgcacctgtaatcctagctactcgggaggctgaggcaggagaatcacttgcaccctggaggtggaggttgcagtgagcagagactgtgtcactgcactccagcctgagcaacagagtgagactctgtctccaaaaaaaaaaaaaaaaaaaaaaaaagttatttgaattgtggtcaagtttatcttaatgatttttaagtgttcagctcagtggcagtaagtacattcatattgtcaccatccatctccagaactttttttttttggagacagagtctcgctctgtcaccaaggctagagggcagtggcacagtctctgctcactgcaacctctgcctcccaggcgcaagtgatcctcccacctcagcctctcgagtagcagggaccacaggtgtatactaccacactcggctaatttttgtatttttttgtagagatggttgggggggtgtctcactttgtggcccaggctggcctcgaacccctgacctcaagtgatccacctgccttggcctcccaaagtgcagggattacaggcgtgaaccacctcacccagcccagaactcttccatcttgcaaaactgaaacactgtggccttaagcactcactccccaatccccctcccccagcctctggcaccccccaacccattctacttcctgtctctatggaggtgaccactccagggacctcccatgagtggaatgactcaggatttgtctttccgtgaccggcttatttccctcagcataatgtcctcaagattcatccacaatgtagcatatgtcagaattcccttactttttaaggctgcctttttttttttttttttttttttttggcagagtttcactctgtcacccgggtgggagtgcagtggtgcaatcacagctcactgcagcctcgacctcctgggctcaagcaatcttcccacctcattttttgattttttgtagagacaagatttcactatgttgcccaggctggtcttgaactcctgagcccaagcgatccctctacctcggcctcccaaagcactgggattacaggcatgagccaccactctgaaacagcccggcctggctgtctgccctttttaagaaaataagattttggccgggcgtggtggctcacgcctgtaatcccagcacttcgggaggctgaggcgggtggatcacctgaggtcaggagtttgagacctgcctggccaacatgatgaaacctcgtttctaccaaaaatacaaaaattagccaggcatggtggcgggtgcctataatcccagctgctcgggaggctgaagcaggagaatcgcttgaatccaggaagcagaggttgcagtgagccsaaatggcaccattgcaccttcagcctgggcaacaagagcgaacctccatctctaaataaaaaatattttggccaggtgcagtggctcatgcctataatcctagtgctttgggaggctgaggcaggtgggtcacctgaggtcargagtttgagaccagcctggccaacacgacgaaactccgcctctactaaaaatacacaaaattagccgggcatagtggcaggcgcctgtaatccctgctgctggggaggctgaggcaggagaattgcttgaatccaggaagcagaggttgcagtgagctgagattgcgccattgcactccagcctgggcgactgatcgagactccatcttaaaaaaaaaaaaagtttttatggaaagtaacacagtgcacagaaaactccaacagtacaaaacagacacatggtttcctctcctccaaagctgtcgcgcccagcgtcctccgggaagtacctgggcagtgtcgcctgggtacagcttgtgcctgacaggggcaatgtcatcgtcacctctgcttgctggggttcccccgacagcctgtgctgccgtgttgttcccggggaggggctgttggcgggcacctccctgctttgtgctgctgtgtggatatcctcccaaggacatcttcctgtgcgtgtgtctggcagaaattcctagacatggaacccttgagtataagggcatgtgcgtcactatkttttttttttttttttgagacgcgtttcactcttgttgcccaggctggagtgaggctggagtgcaatgatgcaatctcggctcactgcaacctttgcctcccatgttcaagtgattctcctgcctcgcctcccgagcagctgggattacaggcatatgtcaccaygcctagctaattttgtatttttactagagatggggtttctccatgttagtcaggctggtctcgaactcccaacctcaggtgatccacccgcctctgcctcccaaagtgctgggattacaggtgtgagccactgtgcctggcttttttttttttttttttttttttttgagtcggagtctcgctccgttgcccaggctggagtgcagtggtgtgatctcagctcactgtaacccctgcgtcctgggttcaagagattttcctgcctcagcctcctgaggagctaggactacagacgtgcgccaccatgtctggctaatttttgtatttttagtagagacgggttttcaccatgttggccaggacggtctcgatctcttgacctcgtgatccacccacctggcctcccaaagtgctgggattacaggcgtgagccattgcgcccggtcgtgcatcactattttgatgcatcatcttcaaaccaccctgccccagcatcacyggactgccggtgtgcccagcctcccctgcacagcttcccactctgctcacagagaagacggtggaggggggagcccaggcgtgggttttccgtgtgctgarggtgtcctcagccacctttttccccaagtcattgacgtgaagctgattttctcattggtggccatggaaactgcccagaaatgggagcagggcctctgagaccctgccccagctagmctctctctccaggcttcagtgtctcctcctggagctgggtgttgactctgtccaagactctgctcagtcacttcctggctgatccccgagtgctcaagtgtgtgatgagattagggctcccccaggcaggaaacggccacattggacccctccctcccccatccctagttcattttattttccccaatcctcatggctcccaactaggccctcctgctcccagacccccccaagccctgtcccccatcccctgtagcccagcgctgagcacactggggccagaaccacccataccagactcccccagggcacracrggttgaggcctctctgaggcagggagggacaacactgaggggccttgtgcagaagagggaaggggtacccccccgagcttcagtttcttcatctgcccgatgagcccccatccaatggtacccaggagtggggatgtgctggggctagaggagggaggccccctggaggctggcttggggacccttcaacctggccacctcactcagggtcagaggtcagagcaggcgagccacacaccccgaagtccccccggtcctcggcaggtgctgtccccagcatcactgtctcccctacagatgcccgtgtgtcccctgggcaagagtgaagtgaggcactcatacaggggtgccttgtgagtatggggtcagccgaggatgctgaggggctctcgaggttcagccagagtccctgaygctgggctcgtgctgctctgggggtctgaagggaccctcgctattaccctctgggaggcgcccatccttggtttttttttttttttttgccgagtctcgctctgttgcccaggctggagtgcagtggcaagatctcggctcactgcaacctccacctcctgggttcaagcaattctcccacctcagcctcctgagtagctgggaccacaggcatytgccaccaagcccagctaatttttgtatttttatgagagatggggtttctccatgttggtcaggccggtctcaaactcccaacctcaggtgatttgcctgccttggcctcccaaaatgttgggattacagccgtgagccaccrtgcctggcctagcagggctcttcttatcctgctcaccagagataggaagtcggggggtgacttcaggaaaggcccagagcccgtgatgggcgtggggattggggtgaggacagggctgtcgtgagaacagtggctgcagatgtgagcggctggcaggaagtggccacttgaaccgcagatgcttcctgggctggtcagggaccggnggtgctggctgcagctgggacccccccctgcatcttgctggcctggcacctgggtccctgggaggcgccacactggatatagccacgtggggcagcccggtctccataacccacactccagtcctcccacgggctggctggcaagyggccctggtgggtctgygggggcaggggcagccttcctggtttatctcyaccggcgcgatctgctcgtccgcctcggctccagaagctggggctcagggtccrgcgaggcaggaagcctgaggccacagcccagagcagcctgagtgcagtcatgtgggggcgactgctcctgtggcccctggtgctggggttcagcctgtctggcggcacccagacccccagcgtctacgacgagagcgggagcaccggaggtggtgatggtgagtggtcctggctttgggntgcagagatggggttacatcagagatggagctgggggyccggagctggggagggggaggccgggaagttgcgggcttcagcccagcccactctgtatccngtctctgaccccatanggctgggctattcccttgagtgtcatgtccagctgtttcccaccagggcagaccccaggctctgagcacctccctccctgctgcttctcgtcacctgccgaggcrggggctgactgaggtcccctctctctcccagacagcacgccctcaatcctgcctgccccccgcggctacccaggccaagtctgtgccaatgacagtgacaccctggagctcccggacagctcacgggcactgcttctgggctgggtgcccaccaggctggtgcccgccctctatgggctggtcctggtggtggggctgccggccaatgggctggcgctgtgggtgctggccacgcaggcacctcggctgccctccaccatgctgctgatgaacctcgcgrctgctgacctcctgctggccctggcgctgcccccgcggatcgcctaccacctgcgtggccagcgctggcccttcggggaggccgcctgccgcctggccacggccgcactctatggtcacatgtatggctcagtgctgctgctggccgccgtcagcctggatcgctacctggccctggtgcacccgctgcgggcccgcgccctgcgtggccggcgcctggcccttggactctgcatggctgcttggctcatggcggccgccctggcactgcccctgacactgcagcrgcagaccttccggctggcgcgctccgatcgcgtgctctgccatgacgcgctgcccctggacgcacaggcctcccactggcaaccggccttcacctgcctggcgctgttgggctgtttcctgcccctkctggccatgctgctgtgctacggggccaccctgcacacgctggcggccagcggccggcgctacggccacgcgctgaggctgaccgcagtggtgctggcctccgccgtggccttcktcgtgcccagcaacctgctgctgctgctgcattactcggaccygagccccagcgcctggggcaacctctatggtgcctaygtgcccagcctggcgctgagcaccctcaacagctgcgtggatcccttcatctactactacgtgtcggccgagttcagggacaaggtgcgggcagggctcttccaacggtcgccrggggacaccgtggcctccaaggcctctgcggaagggggcagccggggcatgggcacccactcctctttgctccagtgacacaaagtggggaaggctgtactgggtcgaacagggtcccttcccccacttcacgtccttcctgggacctcagaatgtgaccttatttggaaatagggttgttacaactgtcactagcrgaggtcactttggagaagggtgggccttacatccagtgtgggtggtgtcctcataagataaggagaggccaggcctggtggctcacgcctgtaatcccagcactttaagaggccaaggcggatggatcacttgagcccaggagttcaacaccagcctgagcaacatggtaaaaccccatctctaccaaaaatacaaaaattagctgggcttggtggctggcgcctgtaatcccagctactcaggagactgaggcagaaggatcgcttgaacctgggaggcagaggttgcagtgagccgagattgcgccactggactccagcctgcgtgacagagagcctgtctctaaattaattaattaattaatttaattcaattttaaaaagacgaaaagtgacggccaggtgcagtggctcacgcctataatctcagcactctgggaggccaagatggaggattgcttgaagccaggagtttgggaccagcctgggcaacatagggggatcccatctctacacacaaaaaaattttttaatgaaccaggcattgtggcatgcgcctatagtcccagccactcaagaggcacaggcgggaggatcacttgagcctgggaggttgtggttgcagtgagctatgattgtaccactgcactccagcctgggcaacagagcaagaccttgtctcaaaaataaacaaactaaaattaaaaaaagaagacgagagatagtgggtgtggtggctcacacctgcaatcccagcactttggaaggccgaggtgggcagatcatctgaggccaggagttcaagaccagcctggctaacatggtgaaatcctatctctaccaaaaatacaaaaattagccaggcgtggtggtgggcacctgtactggggaggtgcccacccagctactggggaggctgagtcaggagaatcgcttgaacctgggaggcggaggttgcggtcagctgagatggtgccactgcactccagcctgggcgaaagagcgactctgtctccaaaaaaaagagaagaggagaggacacagagacacacagagaagaaagccatgtggcggcagaggcagagatgggagtgatgcggacggacacaaactaagggatgccacgatgccaagcacagccaacagccaccagcagccaggagacaggcctgggacgggctctccctcacagcctccagagggaaccagccctgccaccaccttgaccctggacttctggcctgcagaactgtgagacaataaactctcattgttttaagctgcctggcatgtggcactttgtcagggcagcccaggaatctgaaacaggatcaaactctgcttcctgggccctgccagcatctctggctcggctttctgggctggatgcagcccacgacgcactggtgtctgagatggggctggagctggggctggggctgcaktccctggagactcactgcaagttcctgcccaggaggctgagggcaccccatcctcagtgcccaatgctgtggccccaccaggcccagagcctggttggccattctcatgcccaccagcttctggctttgggatgtctcttgagcaaccagaatagcacccccaactctgctccccaaaacccatcactagcacggctcagcctcctgctatcccctgactgctggggaccctcgccttccctcctctcacctgcaggctgatccttcttttcactttctgtcaatgtcaccagggataaggtgggacaatggggggtgggggtggacagtgtgtgctggggggttcgggtgctgcagacctggaactcccttctgccaggatgtyggcagccggttgtaagccttgcaygggacagaccacaaggggccatgccagtggctgtggaggacacagctggtgtgtggggaaggggagaagcctcagcacctggtgcacaaacacacacacagacacagacacacacacacacagagacaccgctgctcactccagggartggcayagggcagtttcaaagaccactggggcatgaactatgggggcaaggcagagggttggagggccactgttgggctcctcattgggtctatgtctctgatcagcccaactttgggcagccctgggctgggggtgtcaggtgcccgggacacacacatgcacacacacacacatgcacacacaaagttcatgtgcaccccagaacatgtgagtaagatcagtaacgtgtattcktgtcaatatcctggagtgatcatttaccagagttttctgagatgttaaccacaggcacaagctgggtgtgtgggtatgaatggtccccaggaccaaactgcggtcccacaactgcatgtggttgtaggattatctcaaggtgcaggtgtttgacatccataaaccctcctccccaccactctgaaaggctgggctgtagacgaagacagggctcagaagccctggcctgtgggcccccaccacccggccactatgtctcygaggggccggagtctggccccatctgtggaacgggctggcgctctgggtgctgctttccaggttcccgctgctcacaggaggccgaggcccggctgtgaccctggagatgaggttttatcttacaacatcctctacagcaagtgggcacggggcctcgggctgaggaaggagccacagggcctgtcgcttgtagggtgccaggggtggggaacccaccggccagggcagcctcagaccttgatctcacaggcagcgaggggcctccgtgctggcagagatcagggctgagcggtgttggctgaaataaataccaccccggagaagatgggcaaatgcagacataagcaggtgccaggggtcacaaaggggaatcaaagtctgctggtactggtggcaggcagctggtagggccccccaaggcaggcaggttctgggcctgggggccctgggagtgggctggtcctctgggcacgaggacatcaggaactcacggtgaggaagcaccggggtcacccagccccggcagccggaagctgaaagtgcatttgctgagagccatctgcttccccgcagggccttgtgatgtgagcccgaggtccccggggggcgaaggcagagggtgcgagagctgggacagtcttagggcaatttggggtcctgggtgccccaaagggaggccggggctttgtgtttcagagaaacgcagcctgttccgttttgaarttgcccaccggctggatgttttgctaatttagtccacatcgtgtttgctcagaaagaggcttttggccacacgagtgctttctgggaatgtttcttctcccgggaacagaatgtcaggctgtgggagctgccgtggccccaggaaaatgatgcccagctccaaggctggggggttggggtgcttggagctccagctgtagctaggaaggtgggggatctcccaagggacctccagctgtcccccctgcaccacacyggtgactgctgagcccacacctgggtcccaagagtctcatcctagggacgggcagatctctgtcattctgttccttgggttcatttagaggcaggtgtcacctgggctgaggtctgcccacccaccatacagagtcacaggctgatagggacrggatgcagccagatggtgtcgtcctgctctcagcagggcagccgttaggaagagaagccgctctgactggccaggagaggagaaagattcctatggggccgccaggacttcgggatgggaccccacacccctttcctgaacccaactccacggggctcaggccagctgccacctcctcatttagatggcagaaccccaactggawgggggacacatggcccaggcctggcactgtacaactctgcctcctttccccttccagtggaccacagtgatgggctctgggtgtccatgtgcggtaagrggggagtagcttgtgtcagaccaccaaccaaatcgaaaagctacccatagcacactacccagcaatacaaaagaacaaactccaggccgggcacagtggctcacgcctgtaatcccaaagctttgggagactgagatgggaggatcacttgagcccaggaatttgaggctgcagtgcacaatgatcatgtctatgaacagccatggcactccagcttggrcaacatacagagaccccatctctacaacacacacacacacacacacacacacacacacacacacacactagctgggcgtggtggtagtgtgtgcctgtggtcccagctactcaggaggctgaggcaagaggatcacttgagctcaggaggtcaaggctgcagtgagccatgaccacgccactacactccagcctgggcaacacagtgagacctcgtttgaaaaataaaagaataggcctggcatggtggctcatgcctgcaataccagcgctttgggaggccaacgcgggtggatcacctgaggtcaagagttcaagaccagcctggccaacatggtgaaaccccacctctactaaaaatacaaaaaaaattagccgggcatggtggcgggcccctgtaatcccarcttctggggaggctgagacaggagaatcgcttgaacccaggaggcggagattgcagtgagcccagattaaaaaaagaataaactatggatacacgaaacaacacaggtgaatgcaagggaatcatgctccaaagattatccgctctgattccatttacctggcattctcaaaataacaaaattacagacgggtagggggaaaatggcttagtggttgcaggtgttgaggggagagatgaagttatggaagagcagctggaaggatcctgtgcagatgggctgtttgttgactatggttgagattacacaaatctgcccatgaggaaaccgcacactgttaactacaggcaaaacttccctagtccaaaaatcctaaatctgaaatgttccaaaatccaagtctttttgagcagcgacttgacgtgctcaaaggcaatgctcattggggcatttcagatttttagattagggatgctgaaccttagctaactatataatgcaagcattctgaaatgtgaaaaaatctgaaatccgaaacactgctggtccccccagcatttcggataagggatccttgacccgtatgmgckcgcgcgcgcgcacgcrcacacacacacacacacacacrcgcgcgcgtgcgcccgcgcacagctgttcgctggtgggtgttgcgtggrccagggtggagggaggatgaatgtcccactttgtccccaggaactctgagcctctgaccctgagtcactcccactgccagtggggggtcggggcggggcggaggagtcggggcaggtcgtcgggggaggttggtaggggagggaggtggggagatattgmgcctatgtctcttatctctggggtgggcccagctgttacctgtcctccgcctccccttcaggctcagggtctgagtcctccacctcaaggccggctccattcagcttcacgtcctgctgtaaaggccccggggccacagaagccaggtcatccccgtaggtggaggacgacgaggccggcagccgctgctctggaaggaagggggcctcggtcgggagggcgtggcggggaggggacccaagggccgaggggaggagatccgtggcccagagcagcagcgatggtgtccccgaggctaggcggggggtagggtcctcaccgagggcgcagcagctgggaggcgcgggctccaggggcgcggcykggcggcaggcggcctcccgcaggcggcaggcgctggcgtagaccaccccgtcggagccgcacaccgggttcccctgggcgccgcagtcgtggtcgcagccgcatcgcgcgatcgccgccccctcctcaggggccacggcagggcccgactcgccggggaaccagcctgggggacgaggcaggctcgacagaccccccaccctgaaccttgcccgcgcccccacagaacctgggggtggggaagatgtccctgggtcccgggcccactaccccctcggtgggtcttggggcgcgacagttaatgggaggtcctgagccctggccttatggaatttcacgcaggtatttgcctaatacttacaaaaacagaaacagacttttaaaaagcggttgtaggagagaaaggagacagggcgtcctgtctgggccrccctgcaacaacagccccgtcccctgccgcgcctcctccgcactgaccacacccaccccaaccccacccccaccgcactgaccgctcctatcctcaaccccgccccctccgcsgtgaccacacctaccctcaaccccgccccctccgtcctgaccactcttaaccccgccccctccgcactgaccacacccaccacaaatcccgcccctcagcgctgaccgcacccaccctcgaccccgccccccgcactgaccacacccaccgcaacctcatcccctcagcactaaccacatccactctcaaccccgtccccttcgcactgaccacacccaccccgttcggccccgccccccgcactgaacacwcccgccctcaaccccgcaccctccgcactcacctccccctcgccgctcgaccccgccctcaccacactgaccaccctcaacccattgcgcccagtccccaccacagtgaccacaccctcactggctcggccctgcccccagtatactgaccattccccagccacttcccttccgcacttaccactcccccagccacgcccctccccgctgaccgctcctccagccccgcctcccccgtacaggcagagcgcccgcccacctctatgctgcgttctcctgactttacgttggcccctcctctgccaagcccccaggggagccctccctggcgtccgagggtgggagtcggggtgtggcaggccgcggtggggggcggcagtggctccgcgcactcacccgggccccgggcaggggcgcgctccacttcgttgcacgcgggtccggcgcacagttcccgggcgagtgggctgtgsgtgctgacgttgtagaagcgagtggcctcgaaggctacgggacgagggtggcgggtgaccaagtgcaggcgcgacgggtcagggaccgggccgggccgggggtgcgggcgcgcgggcctaccgggttcgtagtagtcgtacacggagactggcagcgccgacgtcctgcccaccacgcactcccggagagcacggaaccgcacgcacgtcaggcaccggctggggatctgtggggcagcggcgggcgcaggctcgacccgggccaggaggcccggggcgctgagctcaggcccagaactggctgatttcagggatacccaggacgcgtgaaacacagaagaaacgtgatcccattttctttttttcttttacttttctttttttttttttttcctgagacagagtctcgcgctgttgcccaggctggagtgcagtggcgtgatctcggctcactgcaagctcggcctcctgggttcaaatgattctcctgcctcagcctcccaagtagctgggataacaggcgcccaccaccgcaccctgctaattttttgtatttttgatcaagacggagtttcaccatgttggccaggctggtctccaactcctgccctcaagtgatccgcctcggtcccattttttattctttgggtccttccatcccactgggaaaacgtctcaggtggcctctgaaacaccactcctttttgtgtgtgtgcacgcatggctgagcatgtgtgggtgggagtcagcacattcacgatactgtgcaatcatcacctctgtctagttacagracggtttctttctcccccaaagaaaccccatcgccatcagcactcactccccactcccccagcccctggcaaccacaaatctttccaactctacggatttgcctgttctgggcatttcatgtcaatggawtcatgtactctgtggccttttgtgtctggcttctttcactcagcatcatgtttctgaggttcatccatgctgtagcatggatcaatgcttcgctccttcctacagatggataatatccactgcggcccctccctgctttttctaccaactgccatcagccgagggcacagagctgtcagcatggccaactctgcctggaatttattctcccagtgtcttatttttttttgtttttttttagacaaggtcttgcaggtcttgctctgtcacccaagctggagtgcagtggcacaatctcaggtcaccacaacctccgcctcccaggttcaaacgactctcctgcctcagcctcccaaatagctgggattacagtagcgtgccatcacacctggctaatttttgtgttttttgtagagacagggttctgtcatgttggccaggctggtcttgaactcctgatctcaggtgatccacctgcctcagtctcccaaagtgatgggattgcaggcgtaagccaaagggcctgggcacttttttatattttttgtaaagatggggtctcgccatgttgcccaggctggtctcgaacccctgagctcaagtgatcctcccacctcggcttcccaaagtgctgggattacaggcatgagccaccatgcccggccccagtgtcttttttatggtacaagatacttgcagggagccacaccaggcagtgaccggtgcaccctcaccaacatgcacaccagggaagcctcctccaccaaccccggctggtggtacctcatcaaagtagaagagcactcggcgtccagccacttcatacctcttcatccccatgtgcttgtcaaggagcagctgcagaggaagccagaagtcagkgtcctcagactctctacttgcttcctctcccatcccctgggggcagtggtcagtgggatgcttggacttgcccacaagttaccatgggctggggtctgggtgctggtcagtgctccccaggccctgccagcctctcagcacccaggagaggacgctcaaggatggctatccccgctgggagcacctgcctcgcctccctatacactccctcaacccagccccaagcccaggtcaggcttctccgtggccaaagaggtgcccggctgagccctgccgcctgctggtgtctcagctgcactgttcaagttcccctcccagcctgggatttttttttttttttcagtttttgatttaaaaaaatccacacccactccaaggcctctgaattgaccacatcctcatcccctggtgctccgtgcagcctccttggaggggaggtgacaataggcccagctttcctgttccaccctccccacactgcagacctcctttggtccctgaaaccctcgcttcttggtcctctttctcccccagccagagccgggcagcaatccccacccccatgtccctcttccttcctgtacaaaatggggacatggcactggtctgtcttagggttgtgagggtgacagctggtctcggcagaatgtggattgagaataccccatggctccccacccagggccaaagcacatggaactttgctgaagttctaggtggcatttataatagtgtgacagtgggcccggtgctgtggctcacatctgtaatcccagcactttggaaggctgaggtgggctgatcacccgaggtcaggagtttgagaccagcctgaccaacatggagaaactccatctctactcaatacaaaaaaattagctgggcgtggtggtgcatgcctgtaatcccagctacttaggagactgaggcaggagaattgcttgaaccggggaggtggaggttgcagtgagctgagattgtgccattgcacagcctgggcaacaagagcaaaactccatctcaaataataataataataataatagtgacagtggccgcatgggagatccacctgttggagcagcccccacctcaccccatctactcctcagtagacagatgggccatttttgcccagaaaggggaggaaaaaaggggctgggcatagtggctcatgtctgtaaccccagcactttgtgaggctgaggcgggaggattgcttgagcccaggagtttgagaccagcctgggcaacatggcgaaaccctgtctctgccacaaatacaaaaattagcagggcatggtagtgcatgcttgtagtcccagctactcgggaggctgaggtgggaggattacttgagcctggaagttcaaggctccactgggaatttgagccaagatcagatcattacactgtagcctgggcaacagagcaagactatgtcaaaaaaaagaaagagaaacagggtaaaaggggagggggaggggaagggggagggggagagggagagggaagaaaagaatacccatagcattttacaaaggtctggactgccagccagcctgaccctgggtgcctaagccctacctattgttcagagatccctgcccaccgctgctcaccggcgctgcctcacctgctccaggctctcgatgtctgcccggaagcctgacagcaggggcacctccaggacagccatattggaagaccctgcatgcagccaccttccaacaacaggggagagagagaggccctagagctcaagcccagaggtggaattcaaggtcccctctccccctggagcccacacagctgatgtcccaggaagcctgccctggggcctggccggcaggccaacagcacacacatccttggctcggtcaactcagtcaacctattttacagcagggacactgagaccagagggaaagggccttgccaagggctctaggcctgaccaggtctcttgactaagcattgtgttctgtcctggacttcactctgtgtccccagcctgggaagcagctggcgaccccactctggacatggttgcacagagcagccacagctcaggtgcttcaacactgccaccctgcaggagactctgggaaatcaaccccctagctccggcctcagtttctccttctgtaacatggtggggcggggagggaggtaactgggcactctctggagcctgcaatatgccaggcgcttcctatagggcgttggggacaaggaagaggaagccaacattcagagtggagcttgcagctgcggggagtgcaccaagctggactctgatttccagaactttctgagatggggaacttggacacattcgggctgagagtcaaggtcagggcagccgttaccggggtagcggctctgatgggctgcgagtgtcatggcaaccactcacccaccaatcgtcgccatggtgacaagcatccatcaccatggcaacaaacatcttcttagggtgagggcccgctgcggccgggtcccaggctcactcttggaaaccaaggggtctggtgctggtgttatcgggcagggaccagtgtcccagccacacatcgctgtccccatccagcccacccgccccgaccatactggagtcttctgtgtccatttgcttttctttcattcatttcaaaaactggctgggcgaggtggctcacacctgtaatcccagcactttggggggctgaggcgggcagatcacgaggtcaggagttcgagaccagcctggccaacatggtgaaaccctgtatctactaaaaagacaaaaaagttagttgggcatgatggcgggcacctgtagtcccagctactcgggaggctgagacaggagaaccatttgaacccaggaggcagaggttgcagtgagccgagatcgcaccattgcactccagcctgggcgacagggtgagactctgtctcaaaaaaacaaaacaaaacaaaaaccaccactgagtgcctggagccggaagctcctcctggtcccaggaggccatcctctccgcacattgcaccctcctgggatgcccacgccagcagggcaggtggccttacctggtgcacacctccagcatcaccttgtattcctggtgatgctgatcggccgctgggtcatcatcgtcagctgggggccagtctcctcgggaaccctcagctgcggaggcaggcatggggggcgggcgtccctgggcctcaggctcctggaggcttacgagcagctggaaagctggcttggccaccgggtcaggcacattgtaggtgacatcaatctggggggtgttggaggatggaggcttagggacctgggccctccataacaggtgcagggtaggggaggagaagggcagtggggaggtgggaacagccagaattatgaggacaatgacatccatgacagttttagagactaccgttattcgttttagccttgaaatcactgaagcgggtgtaggtacaatcatcagaccagttttatggatctggggtgcagagctgtgctcagctatgtctgagtctaggggtctccctctcatccacagtgttatctgagctcccattttagagatcagaaaacggaggctagcgagagtcatcgcgggaaacttgccctctgactgccagtcagaacccgtgacatgcacctgccccagcctggtctggggctaaatccaggccacagcagggggaatgacctcgagcccttaggcaaatctgcttgagtcaatgggtcagagatccctggactgagggtcaaatggaccctctcaggtgtgggggtggcacacctgagaggacccatggccacctgccttgggcagtattagaaggctgaaaacctgtcctgcagtctggcatgctgctgagttcagaaccctctgggggtccctggggttccactgtgtgattggagggaatggggcacaggaggacaagcccaagatcacctcgtgctccccaaaacctcacctgcatcaggcagcagccgtcccccttggcactcacaaacagccccgtggggaggctggggatctggagacagaagtcaccgtgaggccctgctgacccctcctccaacaacccccaaaccctcatcccaggaacacgcaccgctgctgtctgcagaaccttctggttggtcctgtgcagctcgaaggtttcctggtagtccaggttggtggaggccagggagacagtgaggttgatgcctccagcataggacaagatggcatattcagccaaggcctgcagagccacgcaggtgtcctggggatggaggaggagacggccatcaaccctgagactgagttggccagtggtcccctgaaccccgtcttggaagcctagcctaaaacaggcaccaacggggctggaatagagactggacccagtgcagacacccatggcactgggggcctcaggacagccaggttggtgtgtccccagaggcagaggctgggctcccatggrggatccaggggcatctgtccctcacccccaacccctgccctctttggggctccataaggtgagaaggggccagactgcctggccacctcagagctcaaaacaaggactgcagggaccccacccacccagccctgagcccctccctctggccctgcccggctcgcctgagtggaggagaagcccccaagtgcatttcgctgctgggacagccacttcaccacaggcagggcggcagccacgtcacccagcagagtgtaggtcagaagggcgtaggctgtcatttccacctcggccgagaccactgcaatggaagaggcccactggggacttttgacacagggacatggacccagtgcatggaggtatggccaaggcaggcacccgggagctggggtggccagtacctgactgagagaccctgtcactgaagctcaagaatgtgcccttgtccacgtcccaggaatttgacaggctccagtgggtgaccccatctgcaaggaaaggagtggtcaagagctataacccacccagtgtgtagcctggcatcccatggagcgcatccaagcatggggtctaaagaaaaggtattgtgggaccccagtgggagaagagtatcaggggaagacagctggaacaggaagggcr

SEQ ID NO: 94479 - DNA, 42758 bp, Homo sapiens
tctctgctccaaaaattgggcgtggaaaaggagcccaatcagaaagaggaaatgaagaaagaggaagtgaagaataaaactgctcagagaaaaataacttcatagaataatattatctccatgaggacaggaatctttctttcatccatgaatatatcctaagccattagaacagtgcctgactgatcaaataattctaataaatatctgttaaatgaataagcaaacatctatgtccttaacccactagaatggtaggaaattgtttctccatcattattagcctccttcccgcttctagggttttaccaaaatttgatcaacgtgccccaggaaataatatctctaatttccaattggttctgatcattctagccatccttgttggccaagccttcagtggttctctgagacctccagctggcactcaggggctctcctgcctcaaatgaagcagaggaaccttaggcaaagccaggagccccaggctggaagtgtagcaggaggtcgtccctttgaggccagggagcaatgcacagctcctctggcaaaccagggccatagccagggctcccttgcccaggtttggggcaggggcactctctttaagctggagaatcctacctctttctcttctctaagcttatttccttaaacttcatcctatcttaggcttttgacttttggaaacaaaagttacaaagagttccaggatgactctgtattcctccccgacttgtactttccccaaggcactgacacacagaacttgctacaaatggacagttaaaatgaagagaggaaaatgaaagattttttatttctttgtttttttgagacggagtctcactctgtcacccaggctggagtgcaatggcgtggtctcagctcactgcaacctctgccttccgggttcaagcgactctcccgcctcagcctcctgagtagatgggactacaggcgtgtgccaccacacctggctaatttttgtatttttggaagagacgggttttcactatgttggccaggctggtctcgaactcctgacctcgtgatctgcccacctcggcctcccaaagtgctgggattacaggcgtgagccaccgcacccggcctggaaaatgaaagatttttaaacccataaatatctcaaaacattatccagccatatggtatgggaccaggtgcataaagttaaggcaatgctgagacctccaggttattccactggctacaacagcagcctaaaagaaagaaagaaagaaacttggggtatccttctctaaactctaatatagaaaggaaatgcatatctagtaacatgtttctttgtctaattatcctcctacaatcagcatcttaaaataagctaatctcttataaaaaatttttggatgttaatatgaccatcagctcaaaaagcattaaagccacttcaatcaagggacacagactaggtttcaagacacttagctcacataaatttctataaattttaatagaacttaatggtctttccatttttttgtgtgggaagggtaagcattattgattttacattttaatacattttaggggcatgatgaacctggacagtaaaagcatccttccttcgccctacctaatgcagaggagcttcctgaaagaaattagtttggaatgaaaggggagcaactgccttgcaggtaaggatgggcagagtgggaggatctttaggactttagatgtaggtttcaagaaaaacagcaacatgaaagtcatgtgtgagaagatgtaattatgaggcagattgagttataaattattatacaaagacaacaaagacatgaaatcaatctttagaaatgattcttcccaagtaataggagataggaatgtcatggaaatacttcaactggaagaaaagccatggaaatacttcaactggaagaaaagccatggcctttctgcaataacctacaatttctttttcttttctttcttttttttttttttgagatgttgtctcactctgttgcccaggctggagtgcagtggtgctatgtcggctcactgcaacctccgcctcccaggtttaagtgattctcctgcctcagcctcctgagtagctgggattacagacgcccgccaccacgtctggctaatttttgtatttttggttgagacgggagtttcaccatgtttgtcaggctggtctcaaactcctgacctcaggtgatctgcccgcctcagcctcccaaagtgctgggattacaagcgtgagccaccatgcccggccgtaaccgggcatggttacgtaggtttacaattataggtttacaatttctatttcttgttcctatccactcccttttgcatctgatgtcaccaataatcttctccaaggaaaaaaaaacagaaaacacaaataagaattatattttatagtgattataatgatcagaattcctcagacttctttctgctgtcattttgctgtgatgttcgagcagctcatatttcagccctaatcagatctctgctgtaatctgaatatatatttaatacaatgctagagatagagaaattttcaaagttaagtagagatcagttaaaataccattactgtttactctgtgtcttttgaattctattatatttatatttgtttacattttgaaaaccaagccatttaaaacagggatcccttcaaagagaacatttatgtggcattttgttgcaggaaaaggtaactgtaaaacacatgtgcctctaattcaaggccagttaacctcaagttattacagttgagataaatcatatttttaaaaatactttttaacccttgttcactcactttttaagccaataaaaacagcaagaattaacttggtcacttttttgtaacccaaatgcaaaccatgggtgcaatcccataaaattttagccacggatataattccaaaggtttgaaagtcccatcttctttattgctcctgtctttgggacaaagcccaatttcccctataataccaacacaaattataaaaagagagtaattgatctcactgtattttccaaacttgttgcttgttactgtcattaagctactgtcaagtctcatctagcacctcctgtgacaccaccttctttttttttttttttttttgagacggagtttggctttcgttgcccaggctggagtgcaatggcatgatctcggctcactgcaacctccacctcgtgggtgcaagcaatgctcctgcctcagcctcccaagtagctgggattacaggcatgcgccaccatgcccggctaattttgtatttttattagagatggggtttctccatgttggtcaggctggtctcaaactcccaacctcaagtgatccgctcacctcagcctcccaaagtgctgggattacaggcgtgagccaccgcacccggcccgacaccaccttctatatcagactttgctgcctcttcatgagatgcaactaaacttaagagacaaagcagagctcaaatctatttttaaaagactttataataaattgtaatcccaggtagaaattttctatttctcattatccacaaaattcttctccattaagcacaggtcatcaagtaaccctgacatcaagtaaccctggcatactgttgtaacaagtaggattttcaaattactaacacacctgtaaaagccagagagttgtgtgtcaccagaaacacatgtgtgccctatgtattaaggtactaaatagaaagcaccatttgctgtgtgtgtgacagtactgattccatgttagaagaaagcttgcttacttgaatacaattattactttgcttgattttgtagatcattcactaaaatcagcctcagaaaaacaggatcttgaacagagataaaagaaaatacctagatcagcctctctgtgaatgggctgaccgacctaataagaataggctgatggtacctgcagaaagccacaaaatattgaccaagaaagcaatgatttactgccgacctgagactgcacacgtttcacaaaaatctttttatcatcctttctcttaattgcccttaaaaaccagaggtggtctttgaacgctagctcactgcatcccccagggttgctggtctcttgaataaagctaactttactttcactacagctcttctcttgggtttttggctttcaagtgacaagtggcccagatgtgagtttccttacgtgtgctcaggagaatttcctgccatacctactgaaatctgtccctgatcaaagtggtggaccatatgactgcagattggccttgcgaagtagctcatgcctgtaatcccaacactttgggaggcagaggtgggaagcttgcttgaggccaggagtttaggaccaccctgggcaatacagtgagacccccgtctctacaaaaacaaaaaataaaaattagccaggcatggtagtccacacctgtagctccagctacttgggaggctgaggcaggaagatcgctggagcctaggagttcaaggctgcagtgaaccatgatcctgccacggcactccagtgtggacaacagagtgacacttaaaaaaaaaaaaaacactgaagatcaacaggttatgattgcaaattttaagatattttgaacacactattttcttaagcagttgggagtatgtttaatagcctattgaatgagtatctcaaaatcctattgaagttactatttggcaatgagaaactaattcactgataattatacatgcaaagaaactaattattaaaataagttttcattttgttagataactttataacgttaaaaaatggaaaagtcctgtagggaatgatttggaacatggcccagatcccagtcacaggaccaaggcactcaatcccccagctgctgggagtgttggttgcttattgctcacagctgagtcccttcctgcacatctcactctccaaaagccttaacccagcgttttgcttcctccccagaaacatcccacatttaatgagcagtcagtaagagggtctaaaggtctgccccctggcctcaattcaggatgactctgaaaggaaatcccggctccagagcccttactggattgcctgaggcctctattacaaattgttcacagttcaacttctttctccctccgcccaacccggcctccctcactccattataggtgttgttcttaagagcacactccaattaccctcctgcaaaccagtctcccccccaactcagagtccagggaattctacctaagacgattttgaaagcggtcctagaaatcaggctctaacatgggattttgaagctagatcacctgccagccagctgccaataagaacctcatccctggtcagtattcagagcacctgtcacgctgcacgatgtgattactaacttgaatccactcatgctaagctgtgtcccaacctagttaactgtatttaaaataaataaaccacaggacttgatgcatgtactttattgcactgagtttttcttgctataccttggacaagactgccacctcctggaagagccgatgaatactggggacgaggtgcaattagggaatcggtactatgaaattgcttgcgtctcagcagcaactccctatctctccgcgaacttaaaccaattcctaacctttctcaacctctgtgaacagctttttgcatggaaccaagacttcaaagaacttgcgcatcacaatctttttacgtgaaaatgtaaatacaagttagcatttgtgaagcgttatgtgccaaatgctttaatttttaaggctcacaacagccttatgaggtaggaactatcataagcagatccacactgctgatggaaaaattaagtttaagggaacgtaaggcgacggctctgaggcggaatcgccacttggagtcgggactcaactgctgagagcgcaagctccgtaactacgtaaccgtctcgggcatgcgcagaaaaacactgaagcaccttccctaggagctgtaagtaggtgggtgtggtgggagcctctgcaatcccagcattcccttcgtgccgctaccaagatggcggcgcccatcttgcggtccttttcctggggccggtggtctggtaccctaaatctctcagtattgttgcccttggggctgcgtaaggcccactcgggcgctcaggggttactggcagcgcagaaggctcgaggtctgttcaaggacttcttcccggagacggggacgaaaatagagctcccagagctcttcgaccgtggcacggcgagttttccccaaaccatttactgtggcttcgaccccacggcagactcgcttcatgtgggtcatctacttgcgctgctgggyctgtttcatttgcagcgagcgggccacaacgtgatcgcgctggtgggaggcgccacggcgcgcctgggagacccgagcggccgtaccaaggaacgcgaggcgctggagacagagcgcgtgcgagccaacgcgcgagctctgcgcctagggcttgaggccctggcggctaatcaccagcagcttttcactgatgggcgctcctggggcagcttcactgtgctggacaactcggcctggtaccagaagcagcacctggtggacttcctggcggcagtgggggktcacttccgcatggggacgctgctgagccggcagagcgtgcagctgcggctcaagagccccgagggcatgagcttggccgagttcttttaccaggtgctccaggcctatgacttctattacctcttccagcgttatggatgcagggtccagctgggcggatctgatcaactaggcaacatcatgtccggatatgagttcatcaacaagtaagtgcctttaaaccttggggaaatcctgggaccaaataatttacacactagtagcctgtgattcactcttaggattgtagttgctgcccttcgttccagctcttgttggttttatccccattaaggctctataatggcgttaataacactggctaataagaattaaagggctgaattaagggtattaagagtaaacggtgtattctaaaaattagctgggcgtggtgatgcacgcctgtaatcccagctattcgggaggctgaggcaggagaatctcttgaacccgggaggcgaaggtttcagtgagccgagatcgcgccactgcactccagcctggggcaacagagggagactccgtctcaaaaaaaaaaaaaaaaaaaagggaaacagaccactagtgaagatttggtcggtctgttttgcttcgcctaagtcgtcctctctaattagagaaactgcttttgtgtgtttataccagaacgtgactgggcctccttgagtagctagcctctgctttagctctgcaccctccatgaaactagtgttagtccttggttggtatctcaraaagttttttcaactccaaataattgacaagtaatgcgggtctaatagcattttcttgagagaggtgaaggatagggctagctcatgtgcaacagagcaaagcacatgtttaaaaggcgtttagaagatttcctttagtgtctcttcctgacaccccttcacccagttttctccttcccactcagcctttcaaaatctctagtccattgttatgtagcacttccccttggcctgcctagaacctgcctggaaccactcatgaggttcagaatgaatagagtaagtacygtaacaatacataagaggaacaagaattcagatttaggaggtcaaggaagttttcctggagcaagtaaccagaaagaaatctggaaggtgaacagtagaacctaccaccacttgtgcttgaggcacataatgaaattgttctttatgcgtaggttgactggagaagatgtatttggaatcaccgttcctctaattacaagtacaactggagcaaagctgggaaagtctgctggcaacgctgtttggctaaacagagataagacatctccatttgaattgtatcaattctttgtcaggcaaccggacgattcagtggaaaggtgagttctgaataatgggctgagaaaaactgacaccataaactcatgatgtaattttagccattgaatctatgtacattttatagtttttttgtttttaacgtagtttctgtctgtacataaaccattacatcatagaagactaatttttactgtgttctaaagttaaacactttgttggttaaagcagaaaaacagtgggtggctagaaaatgtagagccaactttttgatctgtatctagcaagttcttaggattttatcacctgcatattctagttttttcactcctttcaacttaaccttgactacccttatttttcctttgtctctcttctctcacaaatatgactttaaagatcctcttaagaaatgatttctccttaaatcaaattgccttaaactcttggaagaatatgaattaatgagaaacaaatatacctgcaacaaaaagtgaaaaaaatattttgatgctctgtaacatcaaagtaatctaggaataattctttaagacttaaaaggtatatgactttcctgcaaaatattaaaagatgctattgagcaaaataaagacctacataaatggagagttagaccatattcatagtacaaaaataatatcagttcttttttgtattttttgaaacagaatctcactcccattgcccaggctagagtgtagtgacgcagtcttggctcactgtagcctgaaattcccaggctcaggtgcacaccaccatgcccagctaattttgtattttttttttagtaatggtggagtttcaccttgttccccaggctggtctcagactcctggactcaagcgataaacctgcctcagactcccaaagtgctgggattacagcatgagcccccgcacccggccaagataccagttctggatttgatctacatttagtacagtgccaaccatatctaaaccggctttttgtggaacttgacaagctcattgtaacactgacatagaaataaaaagggctaagattggccaagatgtttttgaagaacagagtggaagattatcatgccttattacaaaattttggtaattgtgtttttttctctttagatttagtcctagaatgtttgacgatatagtcctggggttttgatgtattgagaattgataatcttttttttttttttttttttttttttgaggcagtgtctcactttgttgcccaggctagagtgtagtggcatgatcttggctcattgcaacctccgcctcctgggttcaagtgattctcctgagtagctaggactacaggcatgcgccaccatgcccagctaatttttgtatttttgtagaggcagggtttcgccatgttggccaggctggtctcgaactcctgacctcaagtgatccaccttcctcagcctcccaaagtgctgggattacaggcttgagctaccgcacccggcctagagaatttarataatcttttcaaaaattgcattttctatctggttctggtgtatagaaatacaattactttatatatattacctttaaatctagcaactctgccaaactcactatttgattacagacgtgagccactgcgcccggcccaatactgtatttcttgaccatggtgatggttacatagatgttttatgattcattaagctatatctttgtgaataatgtacttttttctgtgtgttatatatatttcaccaaagaaaaagagaatacatataggatgatattatagtcatatatcacttaacaatagggatacattctgggaagtgtgttgttaggtgatttcatcattgcaaatatcgtagagtgtccctgcacaaacatagatagcatagcctactacacacttaggctatacagygtaccctgttgctcccagggtagaagcacrtacagcacattactgtactaaatactgaaggcagtgataacgcgagggtaagtatttgtatacgtaaacatagaaaaagtacagtaaactatggtattataatgttatgaaccactgttggactgtaccagtccgtggcctgttaggaacagggctgcgcaacaggagctgagtggcaggcgagcgagcattacacctgggctccatctcctgtcagatccacggttgcattagattctcataggagcacaaaccctattgtgaactgcgcatgcaagagatctaggttgcgcattccttttgaggatccaacaaatgcctgatgatctgaagtggaacagtttcattctgaaaccacctcccctccccgccgcctcgtggtgccaaaaaggttggggaccgcggatatatgtagtccatcattgacagaaacatcattatgcagagcatgatgatttatatcagtttttaaaattacacagtactttttttttatggccacatgcacatgaaagtataaaaacatgcttgggaaagatggcagcacataaacttagatttatgattatctcggggcaaggaagggaatgtgattggactgcggccttcatctatgcctattttgttccttttaaaaagaaaatacgaggctgggcttggtggctcctgcccataatcccaacactttgggaggctgagacaagaggatcacttgagcccaggagtttgagaccagcctgggcaacacaggagaccccgtctttacaaaaaaaatataaaaattagccaggcgtggtggcacaagcctgtggtcccggctgcttgggaggcagaggtggtagaattgcttgagcccaggaggttgaggttacagtgagccatgatcatgccactgcactccagcctgggcaacagcaagacccccatctcaaaaaaaaaaaaaagaaattgaaaacaaagatgccaaaatagtaacaccttaaatctgggtgatgtgtgcatgggacctactatgttcagtacatttctgtatgtttgtttcatatttaaaagtaagcaggataaccttaaagggtagaagagctggagataaaaattaggtatgttatataagtgtaactctttattttttgtctcaaaggtacctgaagctgttcactttcctgccccttccagagattgatcatatcatgcagctgcatgtcaaagagccagaaagrcggggtcctcagaaacgactggcagcagaagtaacaaagcttgttcatggacgagaaggattggattctgctaaaaggtagtagtttagtatgattaacacttgatagttagttattcagtggatagacatgagaaaagtaggagtatgttttaggattatcttgtcatttatcacaaggactgtcagtatttgacttagcaatttaaaatagcccctgtttattggaaagaaggattatcttgaattaagtttatgaattataccagatagatgtttaaaaaacttttagtctatgccgggcgcggtggctcacgcctgtaatcccagcactttgggaggccaaggtgggctgatcacgaggtcaggagttcgagaccagcctgaccaacatggtgaaacccccatctctactaaaaatacaaaacttagctgggcgtggtggcacacgtctgtaatcccagctactcaggaggctgaggcaggagaatcgcctgaacccgggaggcagaggttgctgtgagccgagatcatgccattgcaatccagccggggcaacagagcgagactccatctcaaaaaaaaacttttagtctagaacttggacactctataattggttaatgggtattagaacatgtatttgaataaacatttatatgatgtagctcttaaaatgtgtttttcaggtgtacacaagccctttatcacagtagcatagatgcactggaggtcatgtctgatcaggagttaaaagagttgtttaaagaagctccattttctgaattttttctcgatcctggaacaagtgtcctagatacttgccgcaaagcaaatgccattccagatggtccccgagggtaagattatttaacttttagatttacagttaattcaccattaaatgttacagttcacaaggccaggagaagtggctcatgcctgtaatcacagcacattgggaggccgaggcgggcagatcacgaggtcaggagatcgagaccatcctggctaacacggtgaaaccctgtctctactaaaaatacaaattagccgggcatggtggcaggcgcctgtagtcccagctacttgggaggctgaggcaggagaatggcatcaacccgggaggcagagcttgcagtgagcggagatcccaccactgcactccagcctgggtgacaragcaagactctgtctcaaaaaataaataaaatgttacagttcacagcatgtgtttccagagaggatgttttcctgatagtgctttagtggcatctcttccttagaaaagttagtttagtccaagaataaagtatagcctgagagtacttattgttgaaaatactttatattttctataatagtacagtactcctatactgtctcttattatatctaacccagtcagtctttcctccaacactggaaaagtgcatttgagggacatgttcagtaaatacactggcatcagtgtacggcttagggatatggtcacagttttagagggatgcagaaacagaggccctatgtaacagattaacacagcccctctcatagtctgtatcctttttatattcggggatgggaaaggttacctaacctatctatagtattaactgaatttctgaaaatgaaatgagcatataatggccaaaaccgcaagtacttttgcactaacctactaacgtcataagactattattgtaaactatataataatccccttgagaattgcattttctattcaggaattgagtagaatattttaattaatcagttatgaggtattaaggagtaaataaggtttttcacaaaaaataattcagcatataattgatgcttatccatttttaaatgaacagtgaggtggaaggaaaagtgttgggtagccagaagacccccaggtgcctcttttgcaggagttcacacagaagtcaaatggttatcggccatatcatggccatgattatgaatgacatttgttatagttgttctctttcaactgtcttggattgtttgcctgtgtcctaaagagtcctagactattctgcctggaaaaagcacccattgtctccctttgcatcacctgccactccaccttagtgattccctcatctgctggtttaacacacagtgaatttgaggctggtgtcatatacttccctrtagtatgtcagcgagacaaataattttcctcactatggaagcagatttcgttttcttctgaactttactatagtgtgttcgctaatactggaagctttaccactactaaaaatgacaccacatctgatttagccagggctctaagtaatactgatttytttttttaatattatataagctaaataggtttggtgcatttaaattaaacatagaacatgatctggaaactagcagacagcgtaaaataatacttcctaaaagaaaggaatctggccttaagtagaaaatattttactgatgagttttataaaaccatgtccatggccaggtatggtggctcacatttgtaatcccagcacttcgggaggctgagggcgggaggattgcttggggccaggagttcaagatctgtgtgggcaaggacgtagtgagactccgtctctacccaaaaataaaggtataaaaatatctttaaaaccatgtccagtagtggtttcttaattttatttggtaacattcagatgagagaaaaccaccatttttctttcttaaggacttccaagatctagccacgctgtagccctgtcttctcagatctcacctctttctagctgctcccatgtttcctgccctgattgtcaaggtagcttcactcccagtttaagtatctcttttttcagtgaaatgttcagccctcacctacccagtgtgctcctagaacaacttctcctaggtctttctttttttttcttgagacggagtctttaaaagagcagattgcaaggcgtaaattccggccagacacagtggttcacacctgtaatcccagcactttgggaggccaaggcaggtggatcacttgaggttgggagtttgagaccagcctggctaacatggcraaacccatctctactaaaaatacaaaattagccaggtgtggtggcrtgcacctgtaatcgcagctactctggaggctgaggcaggagaatcacttagaacacaggaggcggaggttgcagtgagctgagatcatgccagcctgggctacagagcaagaatgtgtttcaaaaacaaacaacaaaaaacaaagagcagtaaagagaggcagaatctattaataatagagcaaacatgaaggtaacagtccagtgccaaatgaaatcttctcaattggagagcctctgaaatctaagtgaaacagtcttttttgggggacagatcaacagtgattggatctctctacttactaaacgtttctattttttaggtatcgaatgataacagaaggcggagtcagcataaatcaccaacaagtaacaaatcctgagagtgttttaattgttggacaacatattctcaagaatggactttccttacttaaaataggaaaaagaaatttctacattataaaatggcttcagttgtgatgaaaagtccttctggttgtccaaataaacttacccatcattcattctcaagacctctgaagggttggctccagaacttagacctttgcttatgcaaatcagaaaaacagaatggactaggactcagtgtgagtaacttcattatttttatgggccggttaataaatatttgtttaataatgggatgttttattttctgatgtacaaagcttgattaccatagaaaaccatgattttcagggttaatctctttttaaaattatacttcagaagagaaagaaatgctgctttcctatcttacccttcctgctctcctttttgtagtgatgaggaacaatgaaaaagaggtagtgtaaggaattgtgaggctgggcatggtggctcacacctgtaatcccagcacttcgggaggccaaggtgggcaaatcgcttgaggccaggagtttgagaccagcctggccaacagggcgaaaccccgtctctactgaaaatataaaaattagccagatgtggttgcaggcacctgtaaccccagctactcaagaggctgagctgcgagaatcacttgaacccaggagatggaggttgcagtgagctgagatcacgccactgcactccagcctgggagacagcatgagtagtgagtgaaactctgtctcaaaaaaaaaaaaaaaaaaaaggaattgtagctgcttttctatcaggtatggagcaccgatgtcactaatgttatatagttgtttataaaatcatcagggcctctagtgtccacattagaaatgggaaaactagtattagaaactttgaatagaaatttgatttttttgtagttcagagagcaaatgtagttcttaaaaaggagaaaaagttagatgaggccatggttgctttgagaaattacagtaagtagtttctttacaaataatagtacaaaaatcagtacgtgacttttcagaaagtttctaattcagttttctggttccttgcctgtgttccagtataattctgttcacattaagccttgttgtcagtggattcctaaggtagcaatgttttataaatttagaaacttaaattggttttaagtttcagcttttccccccaagcagattgcaacttgaggtaaattaaaaagttaaccccccaaaaataaagccaattataccaaatatgcaatcatatgagaatatcaaaaagtatccaggtaaggaaagttttcaggtcaaacttaaaggatttggaatcaagactgagttcagctcttcaaacatgaggcaaattaattctccagaactatttccatatctgaaaaatcaaggcaatggcatccctgttgccttgaggatcaagtgaatcacatacgaaatgattaatcagatttcttttgaaaaccttacaggcagcagagcatggctttagtgttcaaattctagccatttactacctggattacttggagcaagtcactgtcttcatacgcaaaaatggagatgttataataccttggtgaactgtcagaatctggtaggaaaaaagtcgtaaaatttttcgtactctatacggttatgttccaaagtagattaggtattaaaaagctccttttgtctccctttctctgggagaaaagttaagaattcattttttgacaaactttagtgtcatttcataccagcaattttatttacacaataagaacatacaggtatcgtcagagatcatctctacatttcagatcttgactcagtttaagggccaacaaaggaaggcttttctctttccgttgtttcttgcctctgttttttgttgtacaaagtgtgtagtactagcaagtgcattaccatagcatgtctttaattttcaatttgaaatctgatgtgctggagaaaagtgcatcgtaagtttttgtttttgttttttttccccttacaaattcaaaggactagaataatgatagtcatctggaaaaagtaaatcatgaatggctataattttgaaactgatgcttaatgatggcagtgatttttaagtgtggtaacaaacgttttgggagcatgtatcctctgtcaagatggtactagtaacagattcaaagtagtaccatatcgtatcagactgatgtgggggtttttatgtttgacatcagttggtgagcctgttgttccttagtaaattgatgccataagctaaagttaacatattcatattttccctgccaatagtccttcataaatacctggtcataaactgaaaaaaaagtaatatctgcaatataaatgtgttgtctattagagacggggctagatgtcttaaggatttctaagtacatcttaaaatttataatatagtcgttcatamcaagaatcatctggggaattttaacaaaatatgtatatgttctaaacctcatcactaccccataaatgcagcttaggtctgtaagtctgaaggagtatgtgtatctatctgggtgttgttttattttttttttttgagacggagtttcgctcttgttgccaaggctggagtgcaatggcacgatcttagctcaccacaacctccacctcccagggtcaagcaattctcctgcctcaccctcccgagtagctgggattacaggcatgcgccaccacgcccggccaattttgtatttttagtagagacggggtttctccatgttggtcaagctggtctccaactcccaacctcaggtgatccacctgcctcggcctcccaaagtgctgggattacaggcgtgtgccaccacgcccagccttgggtgtttttctttcagctcctccagtactttcatactattctaataaatatattttgttggtatgaagctatgaagcaaaagtagctattaccaatgcatacatacagtacactggttttaagttccacctcaaagtgaatcttagagcctggtgtaagtgctccactttagagatgtaccttaattactactgtatttgcaaattaagggaaatttaggtcatcatttgattttctgaaatctaaaaggaactgaccatcattaccaagtcttwctagataatcaagggtagatggctgtttttaatgtaggaattaatgtaggcattcctgctttcaggtttaagtatgaatcaaagcatattttaatttgctagtgcaaatggacccagaattggaagggctatgtaactacacartatgcacaccacagccatgtcagtgtcacagatcctcttgtgcattcagctttcttaaaaacacatcaaaggctgcaaagaagctcagaaaaaactaaattgaaggacaggtggaatacaatgactctatgtgaggaacttgccaactcacatctttcaaagccagatcagcttatatagtacatgcattatagtcatatgaaatgttgtcttggtgctttcttcttggaggactatggcagcagctttaagactactaacaaagattattacacaggtcatcttatccacaggcaaactgctttgcacaactagaacattaacagttstttttaagttaagttcagatgaaactgtcacaagacagacttgatgtattttatatatactgggaaactttagaaacagccatttattatttggattaaatgtgtgatgtgttctgcaatttggaatacacttttcagtttatagccagtctccacatgagcagattcataccattgcaatacacaggagttcataaataagmttctactcaggtaggcagtaactagcaagttttgagtcaacaaagwstcagtattacatagttctcttcaccaaagatgagtctcccggatttcagcaataatttgactggctccttgtaatgcctgcattaaaggaaaaaaaattttaaatgcttattataaagttatgaaattaatctgaattacgcagggtaatttttccaatatatatgtggtaggtttataactaaccagtttatactaaccaatatcttctctggaattagaatctaatcaagtaccggccaggcgcagtggctcatgcctgtaatcccagcactttgggaggtcgaggcgggcggatcatgaggtcaggagttagagactatcctggctaacatggtgaaaccccgtctctactaaaaatacaaaaaattagctgggtgtggtggtgggcgcctgtagtcccagctactygggaggctgaggcaggagaatggcgtgaacctgggaggcggcgcttgcagtgagccgagattgtgccactgcactccagcctgggcgacagagccagactcccactcaaaaaaaaaaaaaaaaaaaaaaaaagattcttatcaagtaccaacaggaaacaagcctagctagaatataaagactatacatatccaagaatcaaactgcatttaaaactatttctatgtttctatctactacccaagtataaaaaatcaaaaggtccacaatacctttagcatatcagctgcttctttcctgcgctgtgccatgtcctcagattctgtcagaagatcatccaataaggatgatttatacagctggcctactagctcactctgaagagtgtctttcacatgattaaccaaaaaatgcattactgcctttggcacactgcaaaacacaaccaaattatggaattttagccaaaattctacttttaacaatttgggcttagatgctaacctcatgaaataaagttaagtaagaacactactactttggatatttcattaatggcataatcgccctttagatttttgcttaactgtaattaaacattaagaaaagcagttctcggccaggcgcagtggctcatgcctgtaatcccagcactctgggaggctgacgcgggtggactgcttgaggccaggagtttgacagcagcctggccaacatggtgaaacaccgtctgcactaaaaataaaaaattagctgagtgtggtggcacatgcctgtgatcccagctactcgggaggctgagatacgagaatcacttgaacccaggaggtggagattgcagtgagccaagaacgcgccactgcactccagcctgggcaacagagtgagactstgtctcaaaaaaaaaaacaaaagcaacaattcttgatactttaccttcttttcatcatctttatttcaaaactcttcaataagcatttattcataatagccaagaagtgagaaaaatccaaacatcagctgatgaatgcttaaacacagtatatctacataatctagtattattcacacaaaagatatgtcacttaatgacacggatatgctttgagaaatgcattattaggtgatttcattacatgcacagcacagagtgtacttacacaaacgtagatggtatagcctatgacacgcctaagctatatgggatagcctattgctccaggctgcaaacatgtacagcatgttactgtacygaatagggaactgtaacacaatagtatttgtgtatctaaacataggaaatgtacagcaaaaacatggtatcataatctaacgggaacacattcaaatacgtggtctgttgactaaaatgttatgtggtgcgtgactatactgattcatactacagtatggatgaggcttaaaaacattaagtgagccgggtgcagtggctcacgcctataatcccagcactttgggaggccaagacaggtagatcacctgacgtcaggagttcgagaccagcctggccaacatggtgaaacccgtctctactaaaaatacaaaaattagctgggcatggtggtgcacacctgttatcccagctactcaggaggctgaggcaggagaatcgcttgaacccagaaggcagaggttgaagtgggccaagactgcgccactgcaccccagcctgggcgacaaagcgagactccatctcaaaaacaccttctgcagaggatgggggcaaggaaggaaacaaatggaatttttttcttcaggcccacagtgtaaaacactaggaactgttatttctactacaagctacrggtttaaaaagtctacaagcaaaaaagataaatggttctacagacaaaaatcatttatttcaatatgaagtattagactgtttattactctgtgcagtaaaattcatcttagctgctgacagattaccaaaaactggatgcagaatattttctaatagatcacttcacacaactaaatgtatattctccctattactgcatgaaatgacataccaggcaacatgaaggagaagatgcagtagggactagacacatgaaaaaacattctgaacgagaaaaaatacacatatttcctagtaaaagacattcgttttgatactttggaaaaccaagttaaattaaaaaggcaagtcagtgttactagccaaaataattaatgaaactactaaattaaaatttaggaaaaagattttmttaaatgactcaaaatgtggcagccagatagaacaaaagaatctctcatttttaatagctttttctagctgatacatgaggtcctagtcattctatgttaacaaaatgggtcttgctacaagttacccaaggactatcagaaaatccacttgatgatttagaataaaaacctaaaattgtaaaaatacatgtatttttcaaaacagatcacagaatcatccagaagtattaaagtccgtcatttatattaagtaatactaacctgtcttgaatattctttctgacaatgagaaaatatgatttaatgagtcgttcaataacctcacaatctcgctgttcccgagcagatagttttcgtgcaacaggaactggctaaatagggatgagggggaaaaaatattacttttgtgacactaaaatggcagctttaacatctgaaagttatgtaagtttttgagacttttagttctttctgtctaatcgttttcctactaacttggtcacctaccttattacctaaaccaaattgtcatggcttaccacatctagcaggttcacggcatgacctttttgtggactggctggcataattggaatgggttttgatttttcttctgctaataactcttcagcttttgaagttttcagcattcctctccagttgcctgtggttggttcttgaacaccatctccaaccccaccacctccagatgcaacctgaaaaaacatgttccaaaacataccaaccacatcatatctgaccttaactaaaacaaagttcattttatttgacagtagtcaatatacatccagtacccatctgaagtttattcagacagataatgaggtcagaaggagacactaggtagcatgtataactggaaccctgacctatctaaataataaagaagttctgctctaagttgtttgcaaggcatcaaccaacttatgttctatttaattccttttttctttatcattcgctaacttttcaaaatcgttcctcttctcccacccttcaaacactaaattgtaggaaaagtatatgctgcccttaaaaacaaaactactcgttaaaagcacaaagaactgctattcagtttaatttcttaagtaatcattaacactgttaaactctaaaagttccatgaacttacgtctctgaacttaagagtttatatgtttctcaatttacatttctaatagtcaacaaaaatgccataaggtataagtaagaactctttaacaaaaagcaagactacatttgctattcttaggctgacagtcactgtgagttgtttcaaatgcggaatgtgacaaacaacagaagtcccctcaacctctgtactcttaaggatttgctgaaagaaatctagtgctaccattaatcacaagtgcttttgtaccttgttttctagaaaatgtattagtcttgacttctaaaagtcaaaaatgactttataatggaaaaacaattcatcaacatttaagagggttttttttaggtattctttaagatcttacaatctaaaaatggattatataagtttaatagaggattatggcagttagaaaaatggtagtttgaggtatcattctgaatcaaaatatttgctaaaatctgtctttagtatgtcagttaaggtgaactacatttaaatataagtagtatatttatgttacacattaacttaaaaatgagtaattagatttttaaatgtttgttaactatacatgaatgacataccaaatgaaatcttaaggagagagagcacattcagtgtgacgtcatgaatgaaataaaacttgtgcagtgatttagatggtttgattaatatctgagcacagtgggctgagagaagataagacatttataaacctttatttgaagttcagaactttaaatctggataattaaggaaaggagctaaatggcagaaaatcttgaaatagcgatgagtctgaataatttatacattatttaattttyctctaaaatggttatcaagaattgaaaacagtctcaaactctcacagtccccatttgtttttttaatttgcttaagcttctgaagcatatgtgaagctatatatagggtaacaagtgcaaactaactggaagcataagaaagaagcattagatctattagtactgaacagatctcaagatctttaaagaggaaaggraatgtccaaaaatacaattccatctctgaaatctaggaaatctctgaatttcctaccaaaatactaaatttaaaactattcttgaaggtaacaaaacagtgagaaagcctattattgttactaattaaaacaacgtttaatgccatcttccacaggttagataaaaggaacattaagaacataacacagacaagagatagataccactacacaaacaggttctttaatggtggtatagacagtgtttcagtgagaaccaaaggtaccaacatttccattctgaagcaagagactcacatttttagtttctcttctgctgtcctgaattaactgttaaaagatatgttaaaacatgcaawttaacaagcaaaatttaaataccaatgggttgaaattcaaaaagtgcaggataatttcctctttaaattactttttctgtgtgcatcttctatattgcaagcaaaagcatgtcaacaatataaactatgcattgcattgttatataattttaaaatatatattagactaaagtgatctgaccttagcacagtatcccatattaatattcttctattcagtgtattgtttccagaagattatgttgtaccagagaacwaggcatgcaggcttagattaagaatcagaacagaccttgccatcagcctcagcagaagcagcgggggagggctcctgggaggcaggtgccaaagcacttggaactttagaagactaaaggcaaaaaatccaggggggaaaaaaaatcaaggatgcaaaaatgcattcaggaacattctataaatgaatttttcccttctgtaatgaaatcgtaaaataacatgaaaratgaaartaatcatrggagattgtttattctgccttatttccttcaccattgtcacctttgttaaaagtttccttcagatgaatacataagaaaaatccaaatccaaaagcttcatttttatttttggtatttaataagattcttttctggcaaagaattcaaggtaaaagatttttatacacactttagtattacaactattttaattattactagtaattaaaacctctgttctgtgcatactgttttttccaagaaaccctcttattataataaaatcttgagtcatttcagctatgtgcaaagttgataaagtcactgactgaatttttttaaaaagcttgatgcttaaatgcttaaataaatgcttaaatctacttttaagcatttatgtcagtgaattcaaaatactattatctttaaatcactcaaaamccattttaaacttgtatgcctttactcagttagttccaatggagtgttaaagggaggaaaagaagaaaaaattactcctaggactgagtaatattctgagctcatcaatctatctttaggtattgggaatatgcattaaaaacatttttttaccttgtctcgtgatacagctgaaggtaattctctggctagcctgtttctcctttgttcctaagaaacacaagcaaaacaaaagtgattatccaagtattgagatatatgcctactaaaaaatgttcatgttaattgaaaagtgtggagtaacttacagatacatcctctcactgttgggactcatrccataattatcatattttaaaataaataagaaatcatttaacccaaagcttcttaatcttttttttttctgcccacacacctgaaggatacaatacactgtcagtaacagtggctccctgtactggggattctcaaatgaggggcaacagactgccatcttctccccctttcccactaagaaacagtgatgtaaactgtcctcacataaatgtggaacgtggtaagccttcaacataaccatgtggaatttgaagtccagagatcacagaaaactccgcaaagcctttaaaagtcactctaacctgaacacctttgtgttaaactcaaacaactcccctcataaaaccgtatcttgaagaagtatctgtggttgaggttatcctataaaaatgttccatttcttcctccaggaaatagtgttgacaactgctagtcctttctgtaacctggctaatttaacacactgatcaattgcctactgttctaatttgctaatattatcaaagtaacttgtacaaagctaaagaaactgacaaattcaaattagaatgtcccgagcatctgctatatccaagcaccaagataggtaaaagattatgaaaatattggccgggcacagtgcctcatgcttgtaatcccagcactttgggaggccaaggtgggcagatcacttgagggcagttcaagaccagcctggccaaaatggtgaaaccctgtctctactaaaaatataaaaattagccaggcatggtgccgcacacctgtaatcccagctactcaggaggctgcggcaggagaactgcttgaacccaggaggcagaggttgcagtgagcagagctcatgccactgcactccagcctgggcgacagagtgagactctgtcttaaaaaaaaaaaaaaaaaaaaaagattatgaagatatagaaatctgtagatgttaattaatgatggatctctcacaggcagcatcagataaagtagaaactatttaggttaaagtcacaattgctcctaagtaggaagtatttcatgaacacagtccaacttgcaaaaaaatataagttaaagcctcacaatgattttgtttttgttttttgttgaaatggagtctcgctctgtcgcccaggctggagtgcagtggtgtgatcttggctcactgcaacctccgcctcctggattcaatggattctccctgctgcagcctccctactagctgggattacaggcatccaccacccccggctaatttttctatttttagtagagacagttttgccacgttggccaggctagacttgaactcctgacctcaggtgatcagcctgcctcggcctaccaaagtgctgggattacaggcatgagccaccgcacacagcccacagtgatgtttcatgtgtaataattttttttgacagaaatttgacccaattttattttttcatgggcgggtattcagtaataaaaaataacagataataaaagtatagatattaacaatcttcaaaataaaaaattagcatgataaaatgtacattttgaacagggatacaaagcaaaaggccacggtatctagaattctcaccctagtctgttactaaccagttatgatctgagctgctcctggaccccagcagatgtggagtacctgctttgctaactggacagcttaccaactattttgaagccctagtgtcctaatctgttaatgacatgatctgccctcagggtatggtaaagattaaatgaaaatatccacataaagttctctggcacagtcattaaaaccagaaacctattcatttgtagaaaaatactaatctgaaatcatatcacatatgaccttgtcagtgtaacagaactaccgcaaacacaagtttttcatgatgttagtttcaatgtaaaaaaaactaaatcctttaagtgtctacatgctaatttttaacataactgtgatctggcctactttctgagtgttttgaagtgcctactcatgtatgcattttggaattttttctgataacaggaatcacccccagctatgtaaccaaaaattagttccctatacctgtgttaagaaggtgcttgcttcctataatagtgccctgcaaaataagcaccaaaggaataactgctatctgtaagcctcaagctccccagtttttttttaagatggagtttcgcccttgttgcccaggctggagtgcaatggcgcgatctcagctcactgcaacctccacctcctgggttcaagttgattctcctgcctcagcctccctagtagctcagattacaggcacctgccaccaagcccggctaattttttgtatttttagtagagacggggtttcaccatgttggccaggctggtctcaaactcctgatgtcaggtgatccacctgccttgacctcccaaattgctgggattacaggcatgagccaccacgtctggccaccccatctgttttaaccagagttgaagtcaataacacaggatcccttccagcttctgaattgcatgtttacaattttctcaccatggatatgcagaagaggaaatttggtatagcaggggactcaggtcttactgaattagggagtagcagaaaaatgtactatttttggagaaaagcggcagagaaaaaaaatggcttctggataaattgctctgtccaccagccttggctccatctgagatcttattcaatttgttacattaaaatcaaaaggaaagaaaagatccatgaaatgcagccaccccagtagtggtgaaaaaagcactctgcttttccaaatttatgctaagttggttaattcttgagtgtttccttcacagctttcaaagccaaatgaaaagaattttaaatactttgttgtacacacttcccctgtataaactataagttaccaaaatagagccagtcacaccaaatcaatgaattttcagattctttctgaatttcaatttcataagcagaaagtaataatgcctgcaggtggttttgagaattaagaaaacaatgtaatcccctcagcatatttcctgacatgcagcaggcactaatgtggcacatgtctattttatagttactccatgctaaataagtttgatataactgagttacaacagatttttctacctgtgaaaaagcatttaagaattatatttacctctatattattgttcattagcccacaagcatcagcaaagtctggatgttttgtgttgatataagccagttcaattgccactaagttatggacctagaaaaaaagtaagttaggcgatatacaaaaatacatcaaccatattttactttgagaaatttatatataaaacttatgaaacagacaataccgaaaaagtacaggaaacttatgcctaaattacttgataattatattccaactgataaatcttatgccaaacaataatttactctagctttaaaattatttacatttcagcatctaaaactgcatttctaagagggaaaaataacattaaagtaactacaagtattttactcttagggaaaaatagtcatctacctaatgcaaatctaaattccaacactttatgcaactttgctattaaaacttcagatcatccactattccctgtcacttttttagttcattttcaacaataagaaaataagttcgtaacaaggcataagttaaagatgttaacttatttgggtaaaggatacatctaaggacctgaggtagtgactgattagccttaactataaagcacctagttaaaatattatatgtagttcaaaatcctaagaggaaaataaaaaagaaaagttaaaattaatttatccagccctctacagaattgctaagtctttttgtttgtttgtttgtttgagacggagtttcgctctcattgcccaggctggagtgcaatggcgcgatctcggctcaccgcagcctccacctcccaggttcaagtgattctcctgcctgcctcagcctccccagtagctgggattacaggcatgcaccaccacgcccggctaattttgtatttttagtagagagggggtttctccatgttggtcaggctggtctcaaacttccgacctcaagtgatccacccgcctcgacttcccaaagtgttgggattacaggtgtgagccaccacaccactgagtcttacagagagaataaacttgagccctttattatgtgctgtcctaacaaatctcaggtatcagaacagcacttatcagtccagaactgggtaaaaagggtctattaaaatgaaggtccaatgattctgggctaaattcagtcttagacatcagaatctgagggctatccttgctaaagaaacaaccaagcagcagcacttacattccaaggatggttttgtactcttagtaaacctccacggggttcaccatcctgagccaaggacccaaatgcacttttagtgatcagaaagaaaacaaaaaacaaaaaacccagccaacaattagaggcatgagggcaattttaaatgcttatcccatatttctgccaatttcagcatttttatttgtgtggatagcagcaacccacagaatagtagcaagcaactacgatattatagttattaggtcataacaagcaaactgcagaagtggccagattactccgatgtacctcaaagtaacagtgtgctataaatgctcagtttactgaggctaaagatggaactaattttctcttaagatcagtggtactaaataatacagcaaagctattcacacccctcaatcataaatctattttcaagaaaacccatgcctgcaggctaacaatgattaaaatatgaagaaaaaatgcactttataccagaattattaaaaattttcctttaaaatgagactgaaactcaacttgtttttcctcccaatacactggaaaacattatgcctacactctaaagtaaccatataatgcttattaaaaagcagccaagcaaaaatttaaacttttactaatagtaattacaatgatctatgctatagtagctcaccatttcatttgtaacaggcaaccttttacgaagaagacaagtcaccacttcaactatggcatcatgaagtttaggaaatcgtaacaattcctacaaatggtagatgaaagaaaaacgtgtttgttttttgttttttttttaagtcatagtctcactaagccatcctcccaccttagcctcccaagtagctgagactacatgtagaagccaccatgccaggctaacagtcattttcttttacttaatgatcacagaaatactgaattcaatttggagactacatttaagaatcctatttcaaatcactttcaggtaagggaactacagattttaccttgtatcccatcttatacatttccttccacccagtgaaaccaccacttcatgtccttttctagttcatgtgaaacctgttacatttctctccgttacctgtgtactgtaattgctacagtgctgaatgatcctttgcatttcctcatgaaccagttccacacagcggaggctgggmtcttctagacgtttgatttgccgcttcmccagtaactcaaatgaaacctcaggcacaaataaagcaggacgaggaccctgagaaaataaaacttagaactcttattatatatgtaatttcagttcttcccaagggttaakaaagtcacatttttggtacttttcatgaaaaatgctttttaatttcaaatatgagagcaaaataaactgtataattaaatttaaaaagacacagtatatgggtaagaaaaactttaacctcatttttttttacagtctaaaaagctaaacatactcacagtagcatttctaatggcagtcaaaatgtcaatagtgttaaggccaccaagtggatcaacagattctaaggttcgcccaaaagtctcatggaaaatataacaaattctagcaccaccgcatctgaaaggcaatgaagtatatggtttctggcattgcaaaaagggaaagaagatacaagttagaagtctttctagaagctttaagctcatcttattttctgagaaagcctcagataaacaatttcattcattcccattaccatgtgttctaactcagctcattatgaactagtttctctaatttttttaaaggggaaaaggaatcattaaattatatatatgtaaatataataaatgttctgacataaatcaacagttaactaagaattgctaagcaccttttctctgccctagttttccttgaggacaggaaacagtgccttatatttatttccattgattcacaatctgaagtagaggttggcaaactttttccataaagggtcacatagtattttaggcttttcaggccatacagtctctgctgcaactactcaactctaccattaagcacataagcagccatagacaatatgtaaataaataagtatagcttgttagccaggcttgtctcaaactcctgacctcaagtgatccgcccgccttgacctcccaaagtgctgggatcacaggcgtgagccacccgtgcccagccctactcttgctttagacaaattaaatctctctttttttgttgttttgtttctttttgagacggagtctcgctgtgtcgcccaggctggagtgcagtggtgcgctcttggcttactgcaacctccgcctcctgggttcaagcgattctcctgcctcagcctcccaagtagctgggactacaggcatgtgccaccatgcccacctaatttttgtatttttagtagagacggggtttcaccacgttggccaggatggtcttgatctcttgacctcgtgatctgcccacctcggcctcccaaagtgctgagattacaggcatgagccaccacgcccagccttagacaaattaaatctcttgatatagttactgagcaccttatgtttcctatcttgtttaataactagaaaccctggtattatctttttttaaattcaagtccatctgaattctacaaatacctttataatgcctccccaaatcatcccttcctctctatttttacaatcactattgagtacttttttatactagctcaggcaaaaagtactagtctaatattatgctaacagaagtaagccaagcacaaaaggacaaatactgaatgattcaatttatatgaaatatctacaataggcaaattcagagacagaaagtaaattcggccaggcacagtggctcacacctgtaatcccaacactttggaaggctgaggtgggcagatcacctgaggtcaggagttcaagactagcctggccaacatggtgaaacccagtctctactaaaaatgcaaacaaatacaaaaattagccaggtgtggtggtgggcacctgtagtcccagctactcaggaggctgaggcaggatgattgcttgaacctgggaggcagagactggcccaaactgtgccactgcattccagcctcggcaataaagtgaggctctgtctcaaagtaataaagtaattaattaattaaattagaggttaccagggctggagggaggagaggggaatgagtaattgcttaatagataagaatttcggctgggcgcggtggctcatgcctgtaatcccagcactttgggaggccgaggcaggcggatcacaaggtcgggagtttgagaccagcctggccagcatggtgaaactccatctctactaaaaatacaaaaaattagccgggcatagtagtgcgcgcctgtaatcccagctactcgggaggctgaagcgggagaatcacttgaacccaggaggtggagtttgcagtgagccgagatcacgccactacactccagtttgggcaatagagtgagactgtctcaaaaaaagggggactgggcacagtggctcatgcctgtaatcccagcactttgggaagccagggcaggtggatcacgtgttcatgagatcgagaccatcctggctaacacagtgaaacctcatctctaataaaaataaaaaataaaaaataattagccgggcgtggtggcacacgcctgtagtcccagctactcgggaggctgaggcaggagaatcacttgaacttgggaggcagaggttgcagtgagccgagatcgcgcaactgcactccagcctgggcgacagagcaagacagaaaaaacttcgtatctacagtcttgttcctagacacccttcctgccttatctcctattatgtcccatcactatacttgctgttctccaaaaacattattcttgcattattctttgctgttgccaagcctaaaatgccctctcattactgccttctcaaattctattcagagcccaattcaaatgccttcttaaatgtggagttctcccaaaccctgaaataaatgtaaatggtctctcttcagtgtctgaaacgcttgattaggtggacacagataattggtttattaactgtttataaagtgtgcatatacactgtatgtacttttctgaatatgaattatatctaacaataagaagtatttaaataaaagttatacttttgcagcctaatcaagcccagtattaccttgacctactttacccactaaactcttcaaaggcccatttgtggtaatctatttttctcaatatgccgtacatataaccaataattagtctgataaatactctctttacggagttgactcatatgaagaccatcttgggcacactaaagtatacagaactacacatacacacacacacaaattcacgtataaatctgaacaagctctgtggattgtacccatgtccaattttctcactttgttattgtactatagttatgcaagatgtccaacagtgggggagatgggggaaagggtacacagtggagggtgcatgggacctccctgtacatcaccctgcaacttcctgtgagtctataattatttcaaaataaaaaggtgttctaatgagggtgtagagaaatggatgttcttgctggtagtaaaacagtacaatatgctaacaatatgcaatatgtaatgaaagattctaaggatgttatatcctttaatctaataaacttacttctacaaatttatcctcagtgtttacttggacacaaagccccaaagacagatgcaggtagtccatcacagcttatatgtgtatataacagaaaacaaactatccagtagtaggagactggcctaacaaatgagggtatatctaaaaagtaaaatactatgcaaatcttcagactgataatgtatgagacagaaagttatttgttacatgatttgagaaatgattccaagataggtatagcatctgatttttaaagacatgtagtataggcatctatgtgttgtagatgcatacaaaaatgcctaggtcaatgccaaattttaggaattatctcaggttggtgaaattaagagtggtttttttttccattttcagagatagggtctctttttttagcrccatctgcttgcagtgctgcctcttgctcctccccaccaccactgctgccctgagtcactgcctgcacagctccagccgcctggcttctcatagtagccactgatatttggagttcttacaacatggcagacattgacaacctgcctagctagggtagttaaaagaggagtgaatgctctcaaaaacctgcaagttaaaggtgcacagatagaagccaaattctatgaggaagttcaygatcttgaaaggaagtatgctgttctctatcagcctctatttgataagcaatctgagattactaatacaatttatgaacctacagaggaagaatgtgaatggaaaccagatgaagaagatgagatttcagaggmgttgaaagaaaaggccaagactgaagatgagaaaaacgatgaagaaaaagaagaccccaaaggaattcctgaattttggttayctgtttttaagaatgttgacttgctcagtgatatgcttcagaaacatgatgaacctattctgaagcatgtgaaagataccaaagtgaagttctcagatgctggcctgcctatgagttttgtcttagaatttcaatttgaacccagtaaatattttacaaatgaagtgctgacaaagacatataggatgaggttagaaccagaaccagatgattctgatcacttttcctttgatggacaagaaattatgggttgtacagggggccagatagattggaaaaaaggaaagaatgtcattttgaaaaccattaagcagcagcagaaacactagggacatgggacaattcgtattgtgactaaaacagtttccaatgactctttctttaattttcttgcccctcctgaagttcctgagagtggagatctggatgatgmtgctgaagctatccttgctgcagacttcaaaattggtcactttttacgtgagcatacaatcccaagatcagtgttatagtttactggagaagctactgaagatgatgatgatgagtatgatgaagaaggtgaagaagcagatgaggaagaggacaaaggagatgaggaaaatgatccagactatgacccgaagaaggatcaaaacccagcagagtgcaagcagcagtgaagcaggatatatgtggccttgaggataacctgcactgtcctagcctaaacacaattcttacttactgccttatgtttttgtattttcttggtagactgggtaatttttgttttaaaggacaggaaactgatattttaaagaccaatctgttctacctagcattttcactagtttttctgccaggtatgttgaatgcacaaattctgtcacacatgttcattcgctgctacataatttggttcttctggaatatttatatagctcttggagtacagctatgaaaattaacaactgttaaaggaaacacttttttttttygtaattttttccttgaagaaccaaagtattttttcagctgtttgttgaatagggttaagtctgcttggattagctgtgcctttcattactttgttacagaaatgcagggacttgtactaagacaatccatcgtttaaaaaaaaaaaaaaaaccggcatgccagtcgcggtggctcacgcctgcaatcctagcactttgggaggctgaggcaggcagatcacctgaggtcaggagttcaacaccagcctgaccaacatggtgaaaccccgtctctactaaaacacaaaaattagccaggcatgatggcgggtgcctgtaatcccagctactcaggaggctgagatgggagaatcacttgaacccgggagacggtggttgcagtgagctgagatcgtgccactgcactccaacctgggtggctgagcaagactcatctgaaagaaaaaaaaattggcaagacaactatatggttaagaatttaagaacttccagtatgaccacacccaataactgtattagattgttaatggattattgtgttataggtgacatagttaactgtaaagtaacctgactcagtatagttactggtaccacagtgaggtgaataaaacrggatttttcagaagttagcctgaatttcactgtacttttaaatttaacctccattaactaagcatcttttctttgtggtagggtctaccttctgcttccctggaaaggatgaacttacatcatttgacaagacctgttttcaagttatttgttgtttgtttgcttgtttttgtagcctaaaataaaaatttcaaatacaattttagttcttacaagatgtcttaattttgtaccaattcaggtagaaggagaggcctagcttgaattaagggttatactcagtttttaccacattattgaaaagggtaccagctttggaaagagatactatactaataagcaagtgtaaaaaaaaagaagaagaagaagaaaatcttcagtgatacgatgctttaaaaaaaaaaattaaagttcattttctttggggtagagctagagagaatgccccaagcttctgtgtggtttcttctaattcttattgcttgaagtatgagtatgtcacttacccatgcttctgtttactatgtattaaaatgtgtagtactgtttacttaactacctcatggatgtgttaaggcatattcagttaaatctcataaaatgtttctcattctcattaaaagctcacattttgggcctatttgtaatgccagtgttgacactcagcattttgttcacaccatgctttgacaactaaactggaaaacagttatcaaactaaactatcagttagtgatctttgtgtggcttctatatatattattatatatattattattttttatatatatattaaatatttaatttatatttaattaatataatttatatatatatatatatattatatattttttttttttttttttggagatagagtctctctctgttgcccaggctggagtgcagtggtgcgatctcagctcactgcaacctccaccacctgggttcaagcgattctcctgcctcagcctcctaagtagctgggattacaggcacgtgccaccacgcccagctaatttttgtatttttagtagagatggggtttcaccatattggccaggatggtcttgatctctcgacctcgtaatctgcctgcctcagcctcccaaagtgctgggattacaggcgtgagccactgcgcctggccaatgtggctcctatttttatagaagtagatggatgcactatttcacaaggtccaacaatttttttctgtatgactgcatagtagtaaatactacagggatagcacatagtattgtagtcatgagattaaagtagagataagactatttttgacaaaagatgccattaaatttcagactgtagtgccacatttacaatacctcaggctaattactgttaattttgaggcaactttcttttgacgatggcgagggtggactattggattgtcattagaggaaggtctagatttcctgctcttaacaaaattacattgaattcatttttagaggtgatgaaaacttcctttttgagaagttagtgttcaggtcttggaatgtgaacacattgtttgtaatgctatccattcctctcctgagattttaacttactactggaaatccttaaccaattataatagctttgttctattttcaaaatcatttcctttgctttgattagacactctgtttttttgtttgttttggtagccgtagttcatctaaatgcagctttttctgaactttaaagatagaatccctgtttttttttttttttttttttgagacagagtcttgctctgttgcccaggctggagtgcagtggcaccatctcggctcaccacaacctccgcctcacgggttcaagcaattctcctgcctcagcctcccaagtagctgggattacagctgcccaccaccacgcccggctagtttttgtatttttagtagagatggggtttcaccatgttagccaggctggtcttgaactgatgtcaggtgattcacccgcctcagcctcccaaagtgctgggattacaggcatgagccactgtgcctggccagaatcccatttttaacgaactgaggtagcaaaataatctttttcattcttttaggaaatagttattgccaaagtgaaggtgtcgataatacctggtcttgttatataatggggatgtggtttgcagaagaattttctttataaaattgaagtttcaagggatatcagtgtttatgccatttttccagttccaaaattattccattccattctagaaatctgaagtatgtaacttgaaatccttaataaaatttggattcaattaaaaaaaaaaaaggatggaatttcaatatgttgcccaggctggacttgaactcctgagctcaaggaattctcctacctcagccttctgagtagctgggactacaggtgcacaccaacatgtaattttgtttttatgttttatttttacttatctgcattttctaatttttgtgagcaattatactgtgtgtactaaagaaacaaacactttaaaagctaaattatttttaaatacttattaaaatatttaatacttattaaatacttataaaaataagtaaatacttataaaatattaaaatatttaaaaatatgtgacaattttactttgctttatatcatttacaaagcatattttcacacaaccagacatcatcctattatctctacaaagttatatttttgttttatagaaaataaatcttaatcagataatctgagctgaagtcatcttcacaaaaggaaaagtgacctagcaatctaggtaaccaaatctacagaaaaatttcttacttacagctccgaagtttcaatatattttgcagttccttcaatagtgttacaatattctgtggcaaatttggtaataagttggagtaaagtagcacttttatcatccacgggttcaccgtagctatttagaagagactgatactgagcagctagaacatttattcttgttttcaactctggtaaacaatctctgatgtgatgcatcagtaacctaaaaaaggttagaaaggaaggatttaaaagtaaaattgtgtattctaaagccctaaacaagtcaaatttttacaatggggaaaacctatcaaataatttgtcctggcaaatgtgatactgtgaaatatatatttggtctttgtcttcatttcctggcagtcagctcctaaaatccttggactctccaagagcattaagggtgtttagagtgtctctgcatgctaatgagatgactggtggctgggggtccctagatagcttcaggatgggagctggtcaccagaacagcctcagaagagaggagagaggccaaacattgagctgatcaccaatggccaatgaagcttccataaaaactcaaaaggacacagttcatggagtcttcagagagttgaacacatgaaggttcctggagtgtggtgtgcccagagagggcacggaagctccacattccttcccacatgcccagccctgtgcatctcttcatctggctatttatctatatcctttgtaatatgctttacagtaagtgggtatatgctaagtagtgtttccctgacctctgtgagccactctaacaaattcatcaaacatgaaaaggggatcatgggtaccctgacttatagcctgtcagtcagaaacacaggctacaacctgtgcttacaactggcatctgacttgggggcagtcttgtgggactgaaccctcaacctgtgggcgctgacactatctccaggtaaacagtgttagcattgaattaaaggacattcagctagaatcccctggagaattccttgcttgatgtatggggaaaactccccatatatctgctctcaaaagcattctgtgctatactgattaactgtgtgtgaaaaggaaaaaaacaattttgattggtttttcctaaataataaaagcaaggaaaaaatgcaaattattttcatattactgcaattaccacagagaaaataagccacccaatcaattcttcctatataattttggtttcattgacttgtcatttacaattggtacccagcaaagtgaaaatcaaccttattaagatccaagtctatcagtctttagggaataagataaaagtaagagaaaatggcttccacttcagtcatttataaatcatctagaaagggcttctagtccccacacatcagtgggtattcagaatccaacgtatagttatttctacagtgaatagaaataaaagacattctatttctttgtttttccatctccctttcctggtaaataaaacacattctaaggtaagaatagataatgtgaaaattacaaattttaatcagttcctgaaatgcaaagtggaaatgaagtcatctctagttctagccacaaaactaaattaactgtcaaaattttcgtaattaaaacattttaaaatcacttgtacattcattctagactacgtgatgatgtaatgtcaaccaccccaataaaaacagagacatctactcttcaggaacctactatataagaaaccataagtgaagctgttaggaacagtatgaaaatgtaaggaactgaaaatgaaccctctcagacaccaattggtaaaaacaaacacatctcatttccaaaaggtaaaaaaattacctgtttagagtcctagcaagatactttgttccatttctattggccagagatggatatttcttttgaagaaaagcatactcatcacggattgaatcagttacactcttcttgttgttaatatctagctggctcctgaggttgaaaaaataacgaaactattcagcttaactgttgtcctcttcctaccttagatgatgacagcaccaggcattgttctctaatacctgacagggactgttttatttaattctcacaataattttatgtggcaggtattattaccccattgtatagcaaggaactgaggctcacaaaaactaacttaccccaggtcacacactaactggcatagccaagacttgaactaagtgaattgtaagtaactagtgcctaaatagagtaggcctcattattaccattaactatagacaaaaacaataagtaacaggtatagacaggtataaaaatataagagtatcttagtcaactgtatattttatccatggacagggaactaatttctcccaaaaataattaagttaacttgaagaacaatcatctacaaacaacgaacagtgttaggccacctccttacctgaaaaaggagacagctggaattgggagtggggatgggagaatgacagtggggatgggagaatgacagtagggttggaatggaaggacattaaaatagaagcagacaactggaatggatcttatgtatcaggcagtaaaaacattttcattttctaaaggcttgagacccaaagacattaggtgtcatttaaacctacgttgtatctagtttatgtaagaactaggactataactcagatttcatgataatttcagtgtttcctaccatatgaaggctttggactaaaagagatattcatccgaatccagctctttcactacccacgtgacttttggttaaatgtataacctgaggtttctgattataaaatagacatcaacacctacctcaggggatgctgtgaggattccaagagataccatttgcaaattgctcacagtagagtgtctaaaacgtaattagacactcaataataatttccttttcccgatttttaataccaactatttataattaggatacctttaataaaatttctccaagtcacatcctggcaattacacagaatcactaatgctagggattaaaccaatctattaaaatcttgtcacctttaattagacactcaatactagtttccttttcccagtttttaataccaactatttataaattaggatacctttaataaaatttctccaagtcacatcctggcaattacacagaagcatcactaatgccagggattaaaaccaatctattaaaatcctgccaccttaaactctttctcgattgggtgcacattagataatttttcccttacccagtacctcctcatacatagcttaacatgataggcaagaattcttaaagcctggctattacaacatttcttccattttgtggtattgcttactttagaaacattttccagtaaaaatgtctatggggcaggcacagtggctcatgcctgtaatcccagcacctgggaaaccaaggttggaggattgcttg

SEQ ID NO: 94480 - DNA, 166070 bp, Homo sapiens
  misc_feature (1)...(166070): n = A,T,C or G
cctagagttaagatacctaggttggacaacatatgaggatgagggataagtagagttgtaatacgtcatctccaaattgttcaagttgattaacagtcactctacaaggagataaaaatattatgtgcagatcatgtgattgtatactatgaaaaataaaaagcaatactaaaaatttaagaataataaatactacaaaaataccaaatacttactgaaggccaggaacagttctaatcattgtacataaatgaacttatccggtaatcacaaccctatgaggtgggtactattatccccattttacagaagaggaaactatgaatggcagagctgggctcaaatccagctccagtgctggcactcttaactattacacaatggaacagaagattctacaaatgcatcccaaaatgtcagggaatttagtatttgataaagggggcattttaagttaatgagtgaaatgtcaactattcaataattatgaagaacaattggatagattttgagaaaaaaataaagttggaatcctacgtttgtactacacgccaaaataatacccacatgagacaaatattgaaatgtaatattcaaaaccataaaggcgttagaagaaaacatagatgaagagttttctagtcttgaagtgggcaaagcctttcagaacacagcacttaaaccagctactataaataaatgaaatgataacaaatttgattatataaaggatgttaaacttgtatgttctaagaaacagctttataaggttaaaacacaaacaaaaaaatgaagaaaatatttatgacaggaagacaagagtattatccgtgatataaaaagagctattccaactcaacaacaagactattcaacaaaaaacatgggcaaaatgtacaaacaagctatacatttagaagaagaagaatacaaatggccaagaaactaattaaaagatattcaacctcgccaaaaatcaaagatatgaaaatgaaaagaatgacatatcactttgtaagtatcagattaccaaagaaaaaaattagtgaaaatgcacagctctggcaagggtatggggggggaaggcactctcatacttgggtactacaaatataaattcgcgtaatctcttttggagggcaatttggcaatatctatccaattgtaaaatgtgcattccctttgcaggaattcaatttctatttatttatttatcttataggagtacaaacatgtgtaaagctattactacaagaatgtttatttcagcactctccataataatgaaaactcagtaacaatccaaaggaatatctaccctatgtgaataatttaaaactaaggaaaatatgttatgtattggcgtgttaaggcactcataatctgttgttacctctatttatttctgagtagcctcaggggatttcttataggacaactgttacttaatttgcacagctttctaacctgtaaaatgggcataatcgcatcaaaaatatttatcgaacagatataattgccaggcactataataggtgctggtgtatgagtaggaaaaaaaacaggcttggtccctgcctctgaggagctcactgttcagtgtagaggtgtgaggtgtgtgtgtgtagggtggtgaggaacagatattaatcacacaactgtacaattgttttgggtggtttgggaggaaaatagcagagtactatgaacgcgtattacagtggaccttgatccagttttggcggggcggcgggggtcaaggaaggcttccctgaagcaatatttaatttttttaaaaaaagcaagtgatgggccaggcactgtgtaagtgccagctccagagatcaattaaaaagaataaggtaaacgtatagacactgacagaaagaatttcaagaatgcattgtcaataaggcaagttgtaaaacttaaatatatctttatttctccttttttggtttaaaaaatctgcattgtaatataggtgtaaatgtatatatagaaaaagttctgaaagaatatacatcatgccattaactctattcgaataatttgtggatttgtctgatcttctgtaatcagttaaaaaaaaagatatttacatatacaaaaatgacagcatgaatattagaaaaattggtattcaggctgggcacagtggctcacacctgtaatcccagcactttgggaggctgaggtgggtggatcacttgaggttaggagttcgagatcattctggccaacatggtgaaaccccatctctactaataatacaaaaattagccgggtgtggtggcacatgggcctgtaatcccagctactaaggaggccgaggcaggagaatcgcttgaaccagggaggcagaggttgcagggacccgagattgcaccactgtactccagcctgggtggcagagtgaaactgtgtcctgtgtctcaaaaaaaaaaagaaagaaagaaagaaaaatagtattcaaggaaaaaaaaaactttaaacagggtaaagagagatactgaagagtttgaggtgacagtgagctatgattgtgccactgcactctagctctaggcaccagagtgagatcctgtctctaaaaaaagaaaaaaagagactatctaccaagactatcttctgtcataaacatacatagcaaccaatattccattaaatgtatgaagaaaacagttataaaagcacataaattgtacgctataaagtttttaaaaatgcctatgcaactcttgccaagattgatcaggtactgaatcataaaagaaagcacaatgcatttccaatagtagaaataataaaagtcacattaatggaacacagtgcagtacagctaacctctaaccacaaaaacatccagataagaaaaaatttgagtcacctcacaaagaaaatacttctaaatatctcatggtcaaagaagaaatcaaacctaaaattataaactagaaattaataagaatgagagcacttcatatgaagtaaaacactgaaaaaaataaacttagagaaaactggaggaagatattaataaacattaaagctgaaaataataacttaagtagagaatgggaaaaatggtagaacagaaaaataaatctaagaaatagttctttgaaaatatcaacagaataaactctggagagtttagttacatgagaaagagaaatgcatacaaataagatggcttgattggtggatagataaatgacatatatgtagtaaagttataacaaaacatggtaaaatcaatgtggtgggtatacagatgtaaaattctttcaacgtcgtatgtttgaaaactttcataataaaatagataaaaatctcttggggcacagtgcggtggctcacgcctgaaacaacactttgggaggctgaggcagattggagaggattgcttgagcccaggagtttgggacaaggctgggcaacatagtgagacctcatcttgttccccactcccccctccccccccaaaaaaaattagccaggcatggtggcttgcacttgtaatcccagctattcaggatgctgaggcaagaagatcccttgagcccaggagatcgaggctgcagtgagccatgatcatgccactgcactccagcctgggagacagagtgagactgtctcaaaaaaaaaaagaaagaaagagaaagaaagaaaagaaagagagagagagaggaaagaaagaaagaaagaaagaaagaaagaaagaaagaaagaaagaaagaaagaaagaaagaaagaaagaaaatactccttagctaataatcagggaaatgtaaataatgagacatttttcacccattatattggcaaaatattaaaatgattggttaatatcgagtccgggtaagaatttagggaaatgctaattcttactcactgctagtggaggtataaactgaaatagtcgttctacgtggcaatttgtcatttgacattatgtattagaatttcaaaatgtgctatctttgggcagagaatagtggctcacgcctgtaatccaagcactttggtaagccgaggcaggaggatcacttgagccaaggagtttgagaccagcctgagcaacgtagtgatacctcatctctacaaaaaatacaaaaattagccaggcgtgatagcacacgcctatagtcccagttactcgagggaagactgaagtgggatgattgcttgaggtgggaggatcgcttgagccttggaggtcaaggctgcagtaagccctaatcgcaccagtgcactccagcctgggtgacagtgagacactatcttaaaaaaaaaaaatgtgtgctacctttatccaactatttcatttctccatgtttatctcacagaaatattttagcatctgcagaaaaaagcatgtacaaggaattttattgcagcattgttaacagtaaaaaaaaaccccactgtaatagtcaaagattgaaaataacatgtgtttatccatagatgaatgattacagtatattcattcaatggaatactatgcagtaggtaagataaatgaggtagatttatatatattgacatggaaagatcttcaagctacattaagtgaataaagcaattaacataacaatacataaaaaggatgctatttattttttaaatgaaaaacaaaaacaaagccatgcttttctatttgtgtatatgaatgtaaggggaactttaaatttatccgtgttttacaataatcatgtgtaattaggaaaccaattttaaaatgaaaaaagaacaaccgaagttaattacatgctaaagaaagtatagcttcatgttgccactaaatgttacagatgggccgggtctttcgcctgtaatcccagcgctttgggaggccgaggcgggtgaactgcttgagcctaagagtttgagaccagcctggcaacatagtgagaccccgcctctacaaaaaataaaaagttatccaggcgtggtggcgcatacctggaggcccagctacttgggagactgtaggcaggcaggaggatccttgagcccaggaggtcgaggctgcagtgagtcgtgaccgtgccactgcacttcaccctgggtgacagagtgatgctttgtctcaaaaaaaaaaaattgtaaaaatattcaatgaaacagtgtatctcgaaggggccctgtacatctcctgagatcatatacaaaattttatgtgtaagtatatattggggtgggggacccattcattagattctcaattcgagggatgaaccactgctctggagggctggaattagagaagtggagggtataatcacagtttttatttcctcgatgtctcaggagttcttttaatagtgcttttgtctttaaatactaaattaatacatactttttattaaaaattgaaaccttatcgaagtagctagagttccaagtcaaagttcttcgcccctccaatgtcgtccgcagcccacaataattaagtagggttaacaggtgatctcccaccaggtcctttttattcccatgtatttacagatgcagatcctctacaggatccttgtcaatcgcactgccgttccaaataattaaaggaggaaaaaagaatgtttattgagggcttactatgtgcctgaagtgttttaagggtttgctcgcgtgaactctgggtggtcggcttcccacgtcgtctcccaccctccgctctgggtccagccttgccctcttgccccacactccccattcttcacaaggcatctggcgaggtcgttaatttttaaaggtaaatcagatcaaatcatgttcccttccgcggcttccaccgtgcctcgaatcaaatcccaattcttagcgaccctatcatcctctatggttgcatttactgggccttgggtagctcaggcgcggtcccctgcaagggacccgacttcaccgcggagggagctccctcccgaggggcaggggcggggcttcgcttgcggtgggtggagccccaaatcgagtttgagctgagccgaagcgaggaggctttcgactgagggctagcgaggggagcasggctggagcagggctggagcagggctggagcagggctggagcagggctgaagcagggccgcggaccccgcacgctcctgcgggccccgcggagccattgcggccgaggtgagcgtctatccctgggctggagggcgagctctgtacgcgcggccgttctcggtttctcgcgggtggcagtggcgaggttggggggggagttcccacgggaccctgcgcggaggcgcggaggtggcggccttggggagcctgcgggaaaggctgctggaggggcatggcggcctgccccaaccctccctgaaccccgcctcctctcccctcccccaggcctcggcaggcgccagcggagagctagccgcatcttcgggggcagcccggcagctgccggcggcgcggcgagagagcggctgacagaggggatgcgaggtaccggcattagccatggccaagtggccctaaagagagagtagaggccgggccttcagcgtttctcactggttcgaggaaggcggcctcagaggagagggaaggtgaggggcgggcaggcaggcttcgcgggtaactactaggcgttgcatatatatgttttgatatctaaatggtactacacacacacacacattcatttcgactaactgcttgtttaaaaatctgagaatatgtcttgtagatcttcttatatccgggaatccaaatttatgttgggttttaaacagctgcattgtatgattgtactacagtttatttaaccatttcccgattgatatacattagcttgtttctctgttgggggagggaggggactattacaagcaatgccataatgaatgggtttgtgtatatgtatcatgccatgtatgagtatttctgtaggagaaattcttagaagagtaaccgctgggtcagggtgtatatgcattttgaattttgatagatttgtccaaattgccttcccaaaagcctgtactaatttacactctttaatgttgtgcgagagtgcctatttttccacagttatgccaacacgtattatcaatctttgtaattttagccaatttaaagggcaaaaaaatcgtatgtcattgttttcatttgcatttccctgattactggcgaaattgatcatatttttgtttgtaaataggcaaatatcaatagtttatataggcagttttcctatctataagcaataagcattttgaaattttaataataaaaaacctgttcgcaatagcaagagaaacgaataaaaatacctagaagtaaactataaaactttattgacgaataccataaaagaacatctgcatgaaaagagaaggaatactatgcttctgaataagaaggctcaatattttagtgatgtccatttttcctatattggtttatacagttgatgcaatttcaataaatataccaagtttttttggaacttactatgattctaaagttcatccgggggaaaaaaatggctaagaataactgaaaaaaaatattttaaaacgtaagtaaagatagggatatttgtactactggctattaaaatgtactctaaaggaactatttaaattagaacggacagaacaatgcattagaatggaaaagcccacaaatcaagccagattggatcccaagatttattggagaaacactgttggctagacgtggaaaaactgccatattaaaagcttcaggcatttccccccatccccgaagcttgaatattcctttgagggcagactcctttgtttggagaaaaccactttattggatctttttggttatgccaaggtaaagcttcagtagttaaaattggtggctttggaactagaactaatgatatggcctttagttagattaagatggattcaggttagcctgcagtgcggcgagggaaggagtctggataatgtaggtttaaaaatttttttccctatctaatgggcaaaaaatgttatgtcattgttttcatttgcatttgtgtgcttactgtgagattgaacgtcttttaaatgttagtccaggataatatgttattcctggagacaggtaacaatgggggactctttgctccgcttccagaatggagtttggctaattggtacagccttgcccggaagcgtgagaataaacaggttgactttttaaattttcctcaagcactaggctctagacacctagatcgggggcggaggcagttttcaggacatggccgagatttggcgctgagctgtgtcatcgcgaggtttggcagccagctccgcagtgggtcggaaacctcgtggtaggcgagatccctgcaggacgggagggttcctcccttcccccgaaaaactcccagtcattttcatgaagctccgcctttctcctttttaggagtgtgcaccaggtctcgcgatatctcatgtttcctaaaggcgaggcgcgggcggcatcctgcggtgaattaagaaggtctcgccgaggctaaagcgtaatatcgcgatagttctcaacgcatgcgggagccggccgtggtaggttggctccgcccctcactgcttcgttaggttgtgcgtcatttgcttttcgcttcgcgtagggtgaagctgtagctacttcggctttggtgggagggaggaggggtctggaaagggctgggctcaggcttttcccgtccggtagaggttctcgcgggatcgcgcggaggcggcggtggctcggttactgactgcagtagccgcggaggcggcggcaaggtcttcggctcgtgccgttctaagccggagaattctcgcgggagcagggttacgtcctcgtgggattcgttggcggtggctgaggtagctcgcgggtggggggtgggggggcagtgactagggtcggtccgcctgctgttaagatggcggcggaggctgatgtctgtccggccaggacccagcacagaggtgttggctatctgcctttatgacgcctctgaggtgcccagcgttaaggaggtgacgattggcgaaacgccggggtgccggtaaactagacctgaggcgaagaccacctcgtttcttgtccgttgaggcgacaccatttcctgggcctcggccgcgtgtgggcccgcctttgccccaccgatcggtcaacgcctccgttgtcgccgccgcagtgggcggattgggaagggtgggaggggagtctggagttcgctggggagtggggttgggggttaaattgaacggtgggaaagaggagcaaccaatgaagagtggcccctttcccctaccttttctgccggccaacctccgttctcagcacctccgacgacccggatgaataccctggtttttctcgaggtggggtcatcttcgccaactctcgcggttttagagctaaggcttagggttcaagcagtagtgtcactggtgtactcctcctcctctccccacacccctcctaattctgtcgtcccatctaatcttcatctacgtggatagttgaggctggtatttaagggaggggggagtcaaagcttttccctgtgactccttccccagttctaaattcgagtttagcctaagtcctctagcccgctctgtctcccccttccattggtccccttggcgcaggcgttgaatagagcttatcctgttgcctgcatttactccatctttgtggatggtgccatagtagccttccatttcctcaagtcttcatgtttgtatgactctgatccggatttcttagctctgcatgctgctaaaccactattaagcgaaactatgaacgggtcggtgtttggatattgcagtttaagtggccttttcgtttacggccattagccttgccttcctcattcctccccctcagaaggctgtagaggataactctccagtaaacccgctttctgtcttccctgcctcttccatttcccctgcaagcctgggaaccgccccttttccctgccttgctctgagtttctggagcctcttggtctgtggacatctatttttgctgctgagcacctcttacctgcttctcacttcttaatctttctatcccccactccccatactccttttccaggagctgaatcccttagaaggaagataaccctcctctcaggctccactacattttaccccttccatttactagaaaacagcattgattgtcctgccccccagtctgccctgttctttatttcctcttccccccatgccaccgttactataggcagttaattccctatcatttgtttctcctttgtagattacatgttcagcattgttttcttttagccccagtgttgcatagattgaggagataccaacattccccagtcataggcggcggtctggtatggtgaaattaatagtgtgtgttttgggtgtgttttgggttcacattgaaccttgtgaccttgggcaaattttcagattctcagttcatctatataatgggaatagttgtgcttacattagaggattgttgctagaattagttaaaataaaataaaataaaatgtttagctcatggtaggcacataataaattaggattactttttggtgtaagaatgcattggtagatgtacctgtgtcatatgctaattttatgacctgggaaagagtaagagatttttgtttctttaactgtacattcttggtgtatttctaggccagatctataacgtttatattttttttcctcataggccaaactttttatctccagtggttcatgatgtttgaacgtgattcccactctttgtttccttctaatggtctaggaatttcagtgcgtaatcactatcctggaatgaccaccagccataatgttcctgtcaagaaccacacccaagtgttctaccttttggaaggggtgcctcatgccctgcctactcatttcttccactccttcaaaggcagtctgtcctgtcattcactctacaaaagtaatttggtgtcatgcatttcacagtggtaaaaggaacttctgttagctagttttgaagtattcatgctacttttcacctccctcatttgtttggttcctcagatcagtgtggggatctgctatttggcatcttcttacctgagcaagataattcctgtccgagagagaaagatcatttggaatacccagcttcttttccatagcaaattactgctggctctttaatacactacttcctgttgtgttattgccattttatattttctaacgtacttattaaacagatgtgactatttgacttggagaaagttttccttacttttttttttttttttttaagatggagtcttgctctcgccaggctggagtgcagtggcgcgatctcggctcactgcaacctccgcctcctgggttcaagcgatttacctgcctcagcctcccgagtagctgggactacaggcgcgcgccaccatgcccagctaatttttgtatttttagtaaagacggagtttcaccacgttggccaggatggtctcgatctcctgacctcgtgatccgcccgcctcggcctcccaaagtgctgagattacaggcttccttactgttaatatattgattagaccaatattaaagtgtagcattttacaattttttttttaactaattctagcaacaaccctttaatacaagcacaactatccccattattttacttcggctgggtgatgggaattgaagtagaaacgtggtgaaaagtttactaggatttaaaatttacaggaggtaaccatcccacaattagctgtatgtggactctagtttcgaacttcagggtctgctttatttaatttgaagtgctttgtaggtaataaaattttcttccattttcattggagggcaggaaatcactttctgttttgagattttgcattggtgcattttaccgtgggttaagcagtgatcacaaatttattaaacctcaatttcaatttgacccttattgagcaatagaataaatctgggaatgataatctaggtgtgacctaaaagtttaacttattctaggtagatctctgagaagagaggaaggagtgacaataccaaataaaaactttgtctaaggttcaatggcaaagttcaacctgagttgccaggatgtttatcgtttgtctcccaatatggccaaaaagcatgtatgaaggtgaagaataatttttatatgtacagttgttgttttttttcacagaaacaatgaaacaaatacgtccttagtgtttatattgagggtataaacttgtctaaaaaataaactgtcttctataatttcatttgggttgagaactcagttttcaggaatgttgtctaagcgttagaagtattagagttgttggttctgaattcctcagttacttctcaaagcaggtcctaaaaaatgcaaatagatatgtaaggactattgctttagaaataataactagttatgtttgaacataatagaatggttaaccctcctcacacaccctaataaatgtgttgtgtatctcactcctctcccccaactttttttttgtaggtcctccagcagcctgacctgagtgggttagtgatccagagaaaccagcaggccaacttggtcaggaaggttcgggaagctgttggagcagtgtggggaatttcccaccaggatgagtatgattggctgtgattttaggttagtttttgtaaatcttgtgggaagtatttgtattttacttcctggaatggagatagtaggggtggatgtattcccattctgtaatggagctactttggtttcttccattctctggatctgatgtggtactggttgcttctttttttaaagtggagctcattactgaattaaagggaattgtttaaatgaatgatgtctgtacatgattttttaaatcaccctaggcatcgttcaaaaaataaaattgcaagtcattatgtctaaccagttcttattaaagttacgaaaaatttcaaacatgcaaacattgaatagtataataatccccccacttacccatcaccagctttaatagtatcaacttgcacattctatttcatctatacttctgtttgtttggttttttttaatttttttaaattgagatggggtttcatcgtgttgcctagactggtcacaaactcctgggctcaagccatcctcccttcttggcctcccaaagtgttgggattacaggcgtgagccaccaggcccagcctgtttcatctatacttctaaccactgcccccctcaatggattatattggaataaatccctgtcatatttatttgtaaaatacttgtttgtatttctaaaaggcaagggctctttaaatataagatcaaaactattatcacaactgaaaaaattaacagatatttaaaaatatcaaatataaaatgttcagatttctgatttttttttaagctttgttttttttcttttacagtttgtttgaatcaggatcctgagaaagcacatttattgcaaagcattgatacagctgttaaatctattttaatctgcaggttctgtcttttgttttttttttcttccaatttatttgttgaagaaattgtcctatatatagtttcccgccccccatatttggggattacagcccagtagtggtgtctaacccattcttgctcaattaaagaccctggaggacccattataatggaacaatggctataatctcctgtatcctagttggagttgatagtgctgtcataggcactatcctaaaataactagtcatggattcctttttctgtggcaaagtctgatttgatacctgacttcagttccatgtcttggccttgctcattgctccacatgaaaagtaggcctcctggtggaagaagctagtgtttcctaatgacctgattgtgcctttggggtttttcatgcatggtttcaatttccttaggtgatttagttatttttatactactttataatgttgctttttattcttttgatgttagtgtctcagctgttctgacccataacttctaagctattaagacctaataatgagttcctggctgtcatacagttcttgaaatggcaatactaaaacagtttttgagagcttctacttacatgttgattttcagctattatacacaaccttagttttcctactgtgatttttcatttcatttcatctgaaatttatgtttccttagcataaagtcctttaaggacttttaggctgctttatgatgatctcactatctataaggttgatattcataagtacttgggcttttggtgttttgctgtattattcgttgtttcctcaacgactggttactagatgtttatatatgttaatgtcaggaataactcaacttttaagtcgtttgatgtttcataggtggtgttgttaaaacttgatgtacttgttgaccagcttggtcttctggatatagaaatcctttcaggtagtgaagaagtggctctatgagtaaaacaactgtaggttttgtttgggctgttaacctgagcattttcaacttttaagttctctttaaaagtttttagtcatttggctttaaaaattacagttggtggcatagaatgatcccataatgtgattttacagaaagttggaatgttttaatttattatgaatgtaccattacgtggagattgggattgtagatctgattcagtctggattgctgattgaactagatgaatgttaaaattcttcaactctgagattctgatggtataatcttaggtattgaaagacagcagtttttcctttcagtagtcattaagtaaatggtgactaaaagtagggagatgaattattctggaatgacctttcactataaccatttagatttaaaagattgatgagtctgaggatactgtcatgaatttatgtaccacctttagcacaatccaggttttaggtccttgtgattagatatcagagataattgccccagaagtgcgtgggtatattacatttggtggctgttaatgttttggaatgattttggaagattactttgggtacattatttgctatgattattttcttatattcctgtctattttatagtgaggcatgtttctcctggtctttgctttttttttttttttttttaaacttccaatattctttattacggcattctgacaattgagttcttacaggtggaaagacctttcagcacagcgattaagaacatggactctggagctagattcacagagttcaagttctgactcccatttcttaccaggtgtgtcatgttgtgcaaattacttaactgctttgtgccacacggtccttcatctgtaaaatgatgataatactgcctgccttatagagttctgaagaaatttagctgagttaatgcatataaagtgcttagaacaatggttctgaaactttagggaacatcagaatcacctagaggacttcctaaaagattggctggtccccactcccagagtttctgattctgtagatctaggaggggccccagattttgcatttctgataagttcccaggtgatacttctctatttcctgcaaattggcagctggatccagagacttgataaatttcaggttcgttccctttggcaaatatattgcgggggggtggggtgggggggtgttcattcacaacattgattatgttacgatgacttgaattttttggatccattaatttgttggggggctacaaaatggtgacgttctgatgctatcattttgttttcatctgttagctggaataattttgtttcccctcatcttttatttggttactcagcaatatagtttatataggaagagcaggataaatactcaattttttaaaacattgctttcaagatgatgaattggtcccctgtcatcttcaaaaggttacacatataagtgtatatataactatgcatccatagatgtaaacatttgatgggtttcaatacattgcagttctgatccttagcgaagttcaaattgcccttcttgtggctagtggaactctcttaaagttggctcctgattcttactgacatgctctctagtagtctttgatagcttccttgctatctggtatgtcaagatgtttccaggcgcattcttgtgcatttctgccccagacctggaattagctaatgggattaagataaaaggtgaagtcaaaagaaattctgtttttgccaagggtagcttggaactttctatcaagttccacttttctctttccacttaacctccctagcctgcctcttcattcttctctacctttttattagagttaaggtggaaaggtttgagaagccttgataatcataggaagatcatggagcccaggcagttccggatttggggcctggccacttactaggtctgtcagtttgggcaagttaacctatatcagttatgatgtggggaaataccttattcatatggttattggaattaaagagaaaatgtaaggtgttagtacatggtaggtgatcagtagatggtaatttatttaatgtactattttacttaactccttcaacagctcagaggtgggcagtcagggtggtgaaaataatggccatttaacaaaatgtgtctggaccctttaggtctgtgtgggatcatcagtggtgaggcaggatagggtttgttcttgagttattttgggtctgagactttggccagtgataactgaatgttccatagagtagtttttcactttggaactccttaggagtcacatttataccctctgaagggtcttagctagttctgtaatgtgtattacattggttaccttgatctctctccgtctatactggcccctcctattcaaggtgttcaaggttctgttgtaaccttagtaacctataataagtattcctaatagtcatcagtatcaccactgttaacacatttgggcagcaccatgcatggcaggtcagcaaacaggtaaatcttatttttttaaacattacacataatatctaaagtatagtatgtggcatgtaataagtgctgctgaataaatggaagtcattgttcagtttttagcttaatatatctttttttttcttttaacataacatttactgaatgttgctaagtataaggagtaagggacataaaatgaatgagacttggtctctgcccttgagaaactcacagtcgagttaaggactgtgaaatcatgtttaaagttccttagccttttcctttgtgtcatcatttcttcccctgcactgtctatgcatgatatagcctgtccattgtttctcacagctttcctaattctgtgtgcctccccagcctttgagactgctgatatgtgagaaagccaacaattgtcttctattaatacagggtaatatcaagaaaaacctttgggccaatattggatttcagagtggcatgtgcagttgacattacaataccagtttatggtctttagatgggcctgtacacctgggctccagcctctttcctgtgcctttaaactgccttacttccatctttcctcccctataccctacccttaatgtacttggtacataaaaatagaggctcccatacccaggtagtgatcaagtacaatgtaaagaaacagctgtacttcatataaactaggattcgagtgggcctagggtatatcactaaatttccattcttatctataaaacagtaatcggaaagcctatttcataggttgctgtgagcattaaagcgagatgatgtatttttaaatgcttgtaaagtacgaagataaggtcattataatttatataaaatacttagtagctatgttacttggggcaaattacctcatcactgagccagtttcctcatcctttaaatgaagatggtgatattcatttaacaaatatttattgaggacgtagtcattgcagctacatcctgggaatacaaagataagtgactggagaatgtaggacagtgtggtctaggggaaggagacttgcaaatcacacaaaagggtcagtatggtaatatgaggaatgaacaaaatgtgctatagcagtttacaagaaggcatcagagaatgtcacagagttttgttagggttaagcaagataaatgaaaagtacttcatgaattcaaaaatgctatacaaataagttagttaaacgtaccccaaatgaatcaatagtctcaaaccattattgtttcatttcttcacaagacttactctttagatgcatttatttctttgagctagattttatgacctccttaagggtaacctgtagtagagtatcctgaaagttaatgcttttgtctaaaaggatttttttcatccattttatcattttctagtttttaatcactgaattcaggaaaaactagaaaatgtgtgcatatttggggagaggatatacataattccaccacaatgtttagtcactgttaacattttggtgtattcacatcttaatgataagggtagtgtttaaggaataagaaaagaaatctagtaggaaattttaaggataggcatttcccagaataggaaactaaaaacgtccactaacaagaaatggtactcaaactaataatcagaaatgcaaatttaaataaggtcatttttagtcattagattgataaaaaataatttgataatatcaagtcatcgtaaaaggtataaggaagagtctggccttataatactgcctacaagtggcgtaaattgatacagctattttggaggcaattttggcaagttgcaagagagtacatactatgtgatgctatttatgttttaaaaaaaaccatggcaaactgacaactttatttgggaggagggatcatggggaactttacctttttctgtaatatgtgcatttctacttctgaaaaatatactgagaagtacagagaataatacaacaatccctgtccctacccccactccagaattgatcatttttaacatttatttttgccttacatttttttgtggagttggaagtaacacaagttgagtgtccctaatccaaaattcaaaatgccccaaaatgagtttcaacacgatgccacaagtggaaaattctacgcctaagtacttaacactttgtttcatgagcagaattattaaaaatattgtatagggtacaacgaacattatttgggtgatggttacactaaatgtctagacttcactactgcacaatatacccatgtaacagaactgtacttgtgccacctaaatttatacgagaaattgtgtaaaattaccttcaggctgtatgtataaggtgtgtatggaacatgaatggatttcatgtttaaacttgagccgcatcctcaagatgtctcatgatgtataggcagatattcaagaatctgaaatctgaaatcctgctggtcccaagcactggataggagatacttaacctgtataggtaaacaggagatacttttttaatacccagcattcccttccccccttacaatcagtacaatgaattgcttgaatttttctactgtgagaatggtataaattatgaatgtaagtaaaagttcaaaaccgatgtggtggccacacaaaaacctattattaaataatattaaatttgtacagtattttagagtttgtaagaagcattctgattttagtaagaatgctttgggaatagaactttttttcgtttgctcattttcttgttaactcttgtttgaaaacgttttcctgaatttgtttttaagtaatcttcatgactgtagaattatacatggcttattgttgaaaaatacagataaacagacaaatttccgcaaaccccaaactcacagataaaatactcttaacattttggtatgcagtatcttcttcgaaggcttttcttaactgctctgtagccatattatatattttttcagaaatgctctttttaaaatgtaattcattacctcccttccagctttcaattttgtatgaaaaatttcaaacaaaaatgctgaaaacatagcacaatgaacatctgtataccatcagctggatccaacaattaagtatttgccatattagatttatatgtacagatgtgtgtttaatttttctcaacattagaagtaaggatgacactttatccttaaatctttcagctgcatgtcttaagaatgaggacatctcagccgggcgcagtggctcacacctgtaatctgagcactttgggaggccaaggtgggtggatcatttgaggtcaggagttcgagaccagcctggccaacatggtgaaaccctgcctctactaaaaataaaaaaattagctgggtgtggtggcacctgtagtcccagctactcgggaggctgaggcaggagaatcacttgaacccaggaggcggaggttgcagtgagctgagatcacgccactgcattccagcctgggcgacagagtgagactctgtctcaaaaaaaaaaaaaaaagtaaggacatctacaaaaccacaataccattatcacgcctagggagtttattttttcttaatattatctaatatccggttcatattcacattttctcagttgtccccaaactgtctttttttccaagctgttttctccaaactagtgtagaaatggtatttttaactttgctcttcccacatattgacccctgtttcatgtctttgtcattatgtatacttctgtagcatttttaatggctacattgtattctattgtatgcagaatttatttaaccagtttgctttgttcacaccttttgctgtgttcatacttttccctcaggtgtccccaaactgtcttttttcaagctgttttctccaaactagtatagaaatggtattgttaaatttgctcttcccacgtattgacccgttccatgtctctgtcattatgtatacttctgtagcttttttttttttttttttttttttgagacggagtctcgctgtcgcccaggtcggagtgcagtggcgcgatctcggctcactgcaggctccgccccccggggttcacgccattctcctgcctcagccttttgagtagctgggactacaggtgcctgccacctcgcccggctaatttttttttgtatttttagtagagacggggtttcaccgtgttagccaggatggtctcgatctcctgacctcgtgatccgcccgcctcggcctcccaaagtactgggattacaggcgtgagccactgtgcccagcttctgtagcatttttaatggctacattgtattttattgtatgcagaatttatttaaccagtttgctgtgttcacacttttccagtcccagtttctcatgattttaagtaatgcctcctaacatacaggtaattcagcattcagtaaataagtgtcgaatgaaagaagcataggtacatcctaatagataaatatttatgagatccatatttaatatttttaattttttatttccataggtttttggggaacaggtgatatttggttacatgagtaagttccttagtggtgatttgtgagattttggtgcacccatcactggagcagtatacactgaacccaatttatagtcttttatccctcacccctttcccatcctttccccctgagtccccaaagtccattgcgtgacatccatatttatatccttaagaaatttctacaaccggaatgtaaaaatgtaaggcttttaatactcattgctaaattggcctttagaaaggctaaccttgcatttttcactgtgatatgtttagtatatgatccatcatgatttacaatattgtagcacatcaggataagccttgataaatcagaagagtataaatctggatatagccagtatcgttgtagatggctcactgcatatatacacgtatatacatatacgtacgtacacgtatatacatagacatatacatatctgctgccatatttttccaggggctagtttgactcttctactttggagggctttgcagtttgttaacccaatctggagtccaggccccggcttcttacatttctttaaatatcttggtgagaccagccttaaaaggaagtatagtctggagagatgcagacatcactagaagatatccttttacgtagagaattttagatttttgcttttaaaaagtaaagacaggctgcttttatgggtgaattcagatctctccctctagcaaattaccaacagctttaaaagggtagtcttcatgtccaacagaaaagctggatgataccctatatttcctattatccatatcaaactccttattttataggcccagttgtaggagtaataacatatccatggtaacatggctggatagtggtgaaattgagcatcaaacccaggttacctagtccagtattgttttcactatgttttatctctccttaaaactgaactttatttctaaatgtgccatctggtgtcatctgtagaaatacaaagtaagtggtcctcttcctatgagaaagttactccccaaataggggaattttaaagtagaaagtcaacgtgagaaaggcaaaaatccaaagaaagctcagtttctttgcccttttaaccgtagttactactttctgacatgagatcaacttggagctctttcatggaacagttcgatttggccatgtgttttcatgcatttatggatgctataaatcagtagatgagactgaatttcctgcttgtaaaactttttcaaattaaagggctgctttctaagtccatcttattttcccttccttttttcaactgttttaaactataacatgtttgctatttttaaaaagattgaaacaaaataatagtttacaccttttagcattatagttaagtattactgtgttaagtatatacttatgttaagtatttttatactatgttaagctttttatgctgaagtaatggtgtgaagtaggtgtgtacttttattttcatccaaatggttagccagtagctcctgtttttcttcctggcaaagtctatttgatctttaaaaatattcttagcttaaaagtgaattatttgcagaagtgtagttttattttttaaaaacctaggaatttgtggcaagtagaaaactagcatggttacttttagctgtttagtttttgaaaataattcagattgttcatgtttaatatttaacatttgtcttagactgaaggcaaagtactacagatagtgctttaagggatcttagttattgtacttccattttacatcatgttggaagcccagaatgtcataaggtcttaaagccagttggtggctgagaactagagtacctttgcatacttcactttcatttctagcaagcatctttcatgtaatagatatgttttaaagcagtagattgttcagaattgtctggtttatttaagaacatttgaaataactatgtgtcaggctgtgtggagcaccataaaatttactcagacagccatttttttctatatgttgggacacctttgtttttaaaggctttgttttacaactttcttatcagtgaactaatttgagcctcataacaaacctgtgaagttggaattcttttcaacatcctggaaagagtttgctgccaggttgataattgctataaataacttgctcttttaaaccatgcaaaagaatctttgtctccattccttccaaattcatttgaaccagctcaaaacagttgagacccagttaaaatttttgattaagtggcatggcctgcacattatttagtagactgtttaccttttgcagaactgtataatttgagaatgaaactggagcctcccaatctcattgtcatcaaagtagagtttaagttgttggttgtctgcagttatggctaacagtatggagattagtatatactgtatgttctccttcatatgcaggtaatgtgtagaaagattgagaaggccagctcttttgcatatgatcagatttatatatctgtatttctgtcttatcaatctgtagaatacctagcataaggtttctgcctttagattaatctggagccaaaagaaatagaacaaatagcaatacggcttactctttgctgggcacaatcctatgagatagacttgtttattttacagaggtgactggactcagagatgtatggcaacttgtctaagatcacacacctagtaaatggaatttargcccagatctgtctgtttcccaggcttttccattatgctgttgtcctttacttcatttttacttttcttccagtggtagtcttcagcctctacttttttttttttttttttgagatggagtcttactttgtcactcaggctggagggcagtggcatgatctcgactcactgcaacctccacctcccgagttcaagcgattcttctgcctcggcctcccgagtagctgggactacaggtgtgtgccaccacgcccagctaatttttgtatttttagtagagacggggtttcaccatgttggccaggctggtcttgaactcctgatgtcatgatccacccacctcagcctcccaaagtgctaggattataggggtgagccaccgcgcccggccggggaggtttgatctttagagatgctgcttgtttctctgcaaacccaaggacatgagagaattggagctgaataatgcaaaaggggtggaattctgtttctttggtatctggtaccatctttattgtatttgacagtagtctatcatgtggctttgggaaaaaaataccatatacctgtgtttcataaatgaaagggaaatacaagggaaaacattgtcatggctagatagacagtgtcttaactttctttagggcattggttcctaatgttcttcaggtcatagatccttttaagaagccaatgaaagctgttgaccgtcttctgggaaaaagaccaacatatgtaaaatttcccacagaatttcagggtttttgtagtggtcatccttcagtataggatgaggaattctaaagattcctctacacttgtttttctctatatgtcattaagatgtctaaattgctatgttgtttgttcttgtatttcttagtacaggcgtccccgacttaatgatggttcaacttaggattttttgactttacgatggtgtgaaagcgaaacacatttagtagaaagcatacttgagtacccacataaccattttgttttccactttcagtcgatattaagttacatgagacattgaacatttattataaaacgggctttgtgttagatgattttgcccaactataggctctaatgtaaatattgcaagcatgtttaaggtaggctaggctatgatgtttggtcggttgggtacagtaagtgcatttttgacttagatatttccagtttacaatgggtttactgggatataatcccatcatatgttgaagagcaactgtatatatttttctagacttatttttctacacagtggtcaagggtaagcttggctaactgtgtcacttttgcttaaagatatactctgtattatgcaaatttaatttatcttctgtattgatcttataattggttgtgttttcagcctttgggcatgaggaagttgtaattctctttttttgtgtattgacttcgttgcctttatattacgattgcttctaatctattttatttctgatttttttccttattttctacatttctgtacacctggctatctgagtattcatctcaatgccctgcatatagtatgtttataattgttgaatggaaagatgaaggttaaatgaatctaaattgtttttttcagttcaccaagagtttaatgtgacttggattttttttagttttgttaagcatttactggatagttattcatttattaatctgctattaataaatgacagttcatatgctggtacaggaatgcaaagataaatatgatacagtcccactcttgcagaactcagcaagcatagtggggagactgtcaggtaagtaaagaggtgtgctgattgaggatcaatatgcaggatatagttggggctaaataaagcatgtggggagctgagggaaatattatgtaatatcatagcactggtaagagaggtaagcagggaccaggtcctagaggtcttggatgctggtttaaataaggagtttgtacttgatgtaggtaggttttgagttttagggagattgctctggcaacaatgtggaggatagaatggatggatccagcaggaaaaagtctcactttaaaataacttcaatttatgagacttttcaaaacatatacaaaaatagaaaaaagcataatgaacacccatgtaactgtcacccagcttgaacagtgatcaacacagggctattgttctatttataccccgctcctcccctctatttttattaaagcaagttcctaagtcacagaatggcaaagcatatattgaataataatctaatgccatggctctcaaggctggcctgtgctgccaaatcacctgtacagcttgaaaaaaataatccccacttcagacctactgaattagatagctttgaaatgcctgtgtggtcaggcatttttagttttcaaaataagtctcgggtgaagtaagttatttttaagataattttaaaataacttctgacaaatgaaaatactttcctgaactcattgaatgctgcctgtggcccttctgggtgaaattcacctattcgatacaggcaggcttttcttataaatttttatttattttttgtagagacggaggtctcactctgtggcccaggctggtctcgggaaaactcctggcctcaagtgatcctcccacctcaggcttatcctcccacctcaggcttccaaagtgctgggattacaggcatgcagccagaaactgacaattcttaaggtgtagactaggaatattccagagtaccaatttaaaatgtgtagacaaggagtctgttcctctcctgcttaatttgcttaacttacacttaggcattgctgtttttattttttgttgagaataccaagaagggctccttagcatgctgtcatttcctctgtattggtaaaattgataatctgcaactttggtgagccatgtttggttgcctagttcttctgatgccagtttctctaagtaattgggagtatccgggaaggataactcccagatctgcagcttccccagactgtttgaatagaggatgtggcaggagatgtgttctcagatactattctcacgttcaaagtcaacattggaggtttcagattcctctttcttagtatccctccctgcccatattttccttgcttaagcataactgcagtgcagagaaacacccagagccagcataaactcttaatctgaggtatagtgtgttttcagattttaaatgagagactccttcaaggtatttctgcaaataatttccagatttgtcttgggtgagtaaaggctatttttcagttgctttattatgacactttactgtcagtgcccagtaaaacctaggtcagcagttctcagggcacttgagagtcatgttttatgtggctaaggatagggagactggtgtctgtaggagaggggcgtagcaaggtgggctgtgcatatagacattatgtgcaatgtagagttgtggaacagatttgggtttgaatccacgttttaccacttaataggtatgtggccactctcagtaaactgggcacagtcttcatctccaaggattaaagataatgcacaataggtatagagtaagtgttagctatttttttatgatcataaatgtttttcacaatatttgttgagtggatattaatgtattaatagataatcagaaactagataggatggaaaggcctgacaattatgtggtgtcccctttaacaaatcataatcagtgacacctattcctctataatcaaatagtgaatagcaggctggatttcaagatgcatcttactgcttgttgacatgaagaatgctcagggcagctctcacctgaatttactttcagagactataaggcaaaaggaaatcgttgcaaggcaaaaaataaagtattttgctttgtggtactttggagtttagttttctctaagcattttttgtttaagaactgccgtaatgcttccatgatttctatggggattttaggctcattttgattcatccccactcccgtacttacgtgcaacatctcttacctgctaataatcaaccaaagtgcctcctgtgtgccaagctccaaacaccagaagatgtagggaagaagctcctagagtaggcagcagctaatctaaggcatttgtttagatggtgttcttaatctggtgcatgtcctttggctcaggggccagtgttttcttccttaaggaaaattttaggcctggcacagtggctaacgcctgtaatctcagcactttgggaggctgaggccaggaggattgttttaactcaggacttcgagaccaccctggacaacatggcgaaaaccctgtctgtacaagaaatataaaaattagccaggcgtggtagagtgtgcctgtggtcccagctactctggaggctgaggtgagaggattgcttgagcctgggaggttgaggctgcagtgagccaagatcatgccgctgcactccagcctaggtgacagaatgagaccctgtttctttaaaaaaacaaattacaaaaggaaatctgattataaatggatccatgatttataggaaatttggaaggattagaaaagcatgaagcataaataaaactatgtgttaccctgccagctagaggcaaccattaaaggccaactactaataatgtgtatttcttcccttcccaggtttttttttttttttaactttcccaccctgtggcagacattttctcataaatagggaagtgataggtacagagtacaatgtaatcacatatggtgggatatccagtcaagatttgaggggttcgggagaagattgtccaaattctggatatcattctgttcaaacctgcataagtgcttattatattacagtgaaatagaggctaaatggtcccctacccccaattttcaaagggattcttacagttactccgtcttttcaagacagtttgcagccacttgagaacataagctagtgtctttatttaccttttcctctacatttcagtgaccccataattctctgcttccatttacagcctatatatatattttttcccccgagatggagtttcactcttgttgcccagactggagtgcaatggtgcaatctcggctcactgcaacctccgcctcccgggtttaagcgattctcctgcctcagcctccgaagtagctgggattacagacatgcgccaccacacccggctaatttttttgtatttagtagagacggggtttcaccatgttggtcaggctggtctcaaactcctgaccttgggtgatccacccgcctcggcctcccagagtgctgggattacaggcgtgagctactgcccctggcccaacattttcagaagaggtttttacacataccatttatgctttctcactttccattgattccctgactctagtctggcttccattccctccatcccactgaaacaattgcttgtcaaattgtctctattaccaatttcagtggacatacctcattttgacatttgatgcagttgatcactcttgccatcttttgtctctcgtgatagcataattagctagttttgctctttcctcactagcctctccattgctgggttttccttctttccttacctttacacttttattgtattgtattttttttggtagagatggggtttcaccatgttgcccaggctggtctcgtttaaggaatctgccctcagcctcccaaagtgctaagattataggcttgagccattgtacccggccccttctttgccttacctttaaatgctagagcaaataactcagttgcgggcctcctcctttccttctttgtaagcagtcatctccagacccatggcttcaagtaatatatgtgtgctgacaatcacagattttattcttaatgcatacgtctttcctgaactccattctacaaatatttgcatacctatcatgtggaagataccgtgctaggtactgagagcttaacatcttagaaaatcaaaccagtaattacagttgatacttgttatgaaggaaattggaaataaactgggtgctataatagaaaaattacagtgggaccaacttgaggtgggttgtcatggaaagcctctctgggtcttagtttaaatgtcagttcctcaaatggaactagttgtgggaaaggaggggtggcaaaaacattccagcggcgaacttagaaattagagtgttccaagaactaaatggaaagaataattacacagttgaggaaacaagcatagagaggtggatttgtctgcggttatgcagtgagtaagtgatatagcagggattctagcccaggttttctgagtctgtattctgatctagtgcttctcaaactttgttatatggatcacctaaggatcttgttaaaatgcgggttctgactcctcatatctaggtggggcctgaaattctgcaacttttaataactcccaggtgatgtcagtgctgctgatccttggaccacacttgattagtaaggctagtctttcactacatccaactgctcttgagccagatttgggaactacaggtgtcctgtgcccttaaactgattcagtattgaaagtcattatttttaaatattatcaactggaggtgattactatagaatatgagtcacgctttgagtggcttccctcaggatattttagttgtgtacacttgttctgcaggtaaactgtacaaaaccaagattcaaacctcaggggtgtaaggaaaggttgggggaataaggaagtgaaaaaaaatattagataaaagtattgaagtaatggtaatagatatggatggtgattcatagtaattcacttgttttcttttaagttggctatctttctaacctaagtttaggaagcaatgtttattatatatagagattgcttggtgccctgagttctggttctgacccaacaaaggcagtaggccatttctaggaatttgtttcaaactaacttatttttatggaaggatttttttttaaatgtaatagggttttcacctgattaacttctaagaggtagaactcattccccagttactgttcctttcattagtgaaattacagcatctcagcttctcatcttgggccctagtttcctctcttggagtaattttttcaaacaaataggattcagcagtctagaagaatctgtcacaaatttttattcttatctgccaatattttgtagtaataaaactggttttaaaaaaaggtgaggctgggtgccgtggctcacgcctgtaatcccagcactttgggaagccgaggcgggcggatcacaacgtcaggagatcgagaccatcctggctaacacagtgaaactctgtctctactaaaaatacaaaaaattagctgggtgtggtggcgggcgcctgtagtcccagctactcgggaggctgaggcaggagaatggcgtgaacccgggaggcggagcttgcagtgagccgagattgcgccactgcactccagcctgggcgacagagcaagactccatctcaaaaaaaaaaaaaaaaaagtgaatcgcatgttattaaagcatggacttggtagtcagacctggatttagatcttggtgctaacatttactgaccaagaaaggtactttttttctctcttacttcagttttctatctgtaaatagaggcaaaacttgacttgagtggtgaggactgtatgaaaaaatatcatatgaattccctaggtagcatgtctcaaactgtattctttggaatacttcaattggactttgagtagatgccacttgagaaaatggttctgtgygctaataagcctcctttacctaagatgtcttagagccattaataatgtcaattagctatgtgactgccctagtggaagagaaattctgtctataacatttcccaaattacaggattcttgtctccctttatagagcaagacattctaacacactttggggaactccagtctcagtattgtctggcttgtaatggacactcagtatactaacgttcccccctcccactgttgaaaccagttttagaaatatgagaacacaacaacttctaaatttttaaagttgatgtctcatggacagtgatgtcttggttttttaaactacaaatgtttcttgcagtagaattatagacaccaaggtaggactgcacttgttatgggaacatttgtgtgtgtgcattcatattggctctgttattttattgggtgcatcaaatgcttacacttgggacttagagtctagcgccactcatgcaaataacctgagatgatttagaattatgccaccagcatagtttctaggcatccagagtcttgtgttggcagcagaagtaccccaagctaagctgtttccgtggggggtctggctgtagttccaggctccctagcttccttggttcctcttagttttctgcacgtggagctctagccttctgtcagttctgtgagctatcagatactctccagtaaattacttggctgcattaattatccagtctttctgtagttacagacacttgactagtatagtacactaggtcaaaacagcattagagcaagttgcttatttgtttgaagattcatcagtgactcatctgcattaaaaaagtaaaatggttgtgatttgcttatttcagtgcataagttactctgtgctcttgttttggaggattgtttttttaaaatagactttatttttagagtagttttacattcccagcaaaatcgagcagaaggtacagaaatttcccatatactgcctgcctccacacaggcatagcctcccttgttatcarcatctcccactagagtggtacacttgttacaattgattaatctacattgatacatcattatcactcaaaggccatagttaacattagggtttactcatggtgtatacttttggggtttagacacataataacatgtgtccaccattgtagtatcatacagagtagtttcactggcyaaaaaatcctctgcgctccacctcttcattcttccctccccactaaccctcctcaaccactgatctttttactgtctctatagttttttcttttctagaatgtcatgtggttggaatcatacagtatgtagcctttttgtactgatttctttcacttactaatatgcatttaggtttcctccatgtttgttcatggcttgatagctcgtttctttttagtactgaataatactccattgtctggatgtaccacagtttatccattcacctaccaaaggacattgtggtttcttccaagttttgacaatagtgaatgaaggtactataaacatccatgtgcaggtttttgtgtggacataagttttcaactcctttgggtaaataccagggagtattgattgctgggtcatgtggtaagagtagttttgtaagaaattgctgaactgacttccaaagtggctgtactattttgcattcccaccagcaatgaatgaatgttccacttgctccacatcctcacaagcatttggtgttgtcagtgttctgggttttggccgtagtgatatatcatcatggttttaatttgcatttccatgatgccgtatgatgtggagtatcttttcatatgtttatttgccatctgtctgtctgtggtgaggtgtatgttaaggtctttggcccattggcccatttttaaatcagcttgttttcttactgttgagttttaagagttctttgtgtatcttgggtaacagtcctttgtatgtcttttgcaaatattttctgtcagtctggcttgtccacttattcttttgacagtgtcttttacagagcagaatattttacatttaggtctgtgatccattttgacttaatttttgtgaaacatgtaatttcggtttagattttttttttcgcatgtatgtatcgagttgttccagcaccatttgttgaaaaaactatcttttgtccattatattgactttgcttctttgtcaaagatcatcggttgacaatatttatgtgggtctacttctgggctccctaattctgttccattgatttgttcattcttttaccggtacagtactcttacttactgttgtcttatgataagacttgattttgggtaatgtaggtcttctgactttgttcttctcctttgatattgtgttggctatcgtggatcttttgcctcttcatataaattttagaatcagtttgtcagtattcatataacttgttgaaattttaattggagttgcattgaatctgtggagttggaaatgacttaacattttggcagtattgaatcttcctatccatggacttggaatatctctccatttaattgttctttgatttctttcatcagaattttatagtcttccttgtatagaccttatacatattttgttagatttatatctaagtttttcagttttggggtgctaatataaatgttttttatttcaaattctgcttgttcgttgctggtatataggaaagcaattgactttttttttttttttttttttttgagacggagtcttgctttgtcgccccaggctggagtgcagtggcgccatctcagctcactgcaagctcagcctcccaggctcatgccattctcctgcctcagcctcccgagtagttgggactacaggcgcccgccaccacgcctggctaattttttgtgtttttagtagagacggggtttcaccgtgttagccaggatggtctcgatctcctgaccttgtgatccgcccgcctcagcctcccaaagtgctgggattgcagacctgagccaccgtgcctggccagcaattgacttttgtatattaaccttatatcctgcaaacttggtgcaattgcttgttagytccagggtgtttttccttatttcagattttctgcatgtatgatcatgtcatctctgacaaaaagacagttctgtatcttccttcccaatctttataatttttatttcctttactgctttagctaggactttcaatacagtgttggaaagcagtggtaagagaggacatctttttcttttttgagacggagtctcactctgtcgcccaggctggaatgcagtggcgcgatctcagctcactgcgatctctgcctcctggattcaagcaattctcctgcctcagcctcctgagtagctgggattaaggggttttgccatgttggccaggctggtcttgaactccttacctcaaatgatctgcccacctaggcctcccaaagtgttgggattacaggcatgagccactgcgcctggccttttttgtttgtgattatttaagggggaatgctcctagttcctgaccattaagatattagttgtagctttttttgtagatattttaatcaatttgaagaagttctctattcctagtttactgagattgtttgacttttcactgttgaattttgagagttctttatgtattttagatactatatatggtttgcaaatattttctcctagtaaattttattgtcctatatttaagtgattcattttgagttaattttttatataaagtgtgaggcttaggtcgaagttcatcttttttgcctgtgcatgtctgctttctctggcaccatttgttgataaaactatctttccttgactgaattgtttttttttttaacctttgtcaaaaatcagttgggcatatttgtatgagtctatttctgggttctctattctgctctattgatacttgtatatatatcagtactacttgatgtctgtagctatatagtaagtcttaaaagtgggtagggtaattcaattcctccctcttttatttttttccaaaattgtttcagccattgttgttcttatacaacatatacactttagaataatctcagcttatttacaaaaaaacatcttgctgggatttgaataggaattatattaaacctatataacaattttaggagatttgacatctttactagagtcttagatctctccatgtatttagagctttgatttttttttttttttttttttttttgagactggagtctcgctctgtcacccaggctggagtgcagtggcactatctcggctcactgcaagctctgcctcccgggttcatgccattctcctgcctcagcctcctgagtagctgggactacaggtgctcgccaccacgcctggctaatttatttttttttattttgagatggagtctcgctctgtcgccaggctggagtgcaacggtacaatctaggctcactgcaacctccgcctcctagtttcaagcaattcttctgcctcagcctcccaagtagctgggattacaggcttgtccttccacgcccggctactttttttgtatttttagtagagacggggttttaccgtgttagccaggatggtctccatctcctgacctcatgatccgcccgcctcagcctcccaaagtgctgggattacaggtgtgagccactgcgcctgcctggcctttgtttttttaagatggagtctcgctctgttgcccaggctggagtgcagtgagccactgcgcccatcctctgggaggcttttaaaatagatttcttgggttttctatgtggatgatcctttgacatctgcaaatagggaccatttttattttttcttttcttatctgtgtgcctgttatttctttttcttactgtattatattggctagaactttcagcagtatgttgaataaaagtcatgataacagacatctttgccttgttcctaatcttagagggaaagcatcagttatttgagttgtattgaggctggctgctacgtcttgcagcaggggcagtttaatagcctccctgcaaatgactgaagcgacaatagtgtgacagccacttgcgtaagacgtttatgagaaaaggggaggaaaaaagccttgagagtaagcgtacaaatagctcagcttatagtttccaccacatggacaggattgttgccagaatcctgttggcttcatttgagatattttgaggttgttggcatcaggcattttgttcattttgtattgatactgagataactttttaaaaagtaatctggaattacacaccctaaatatcaaccatagaaaacattttttcttcttaaggaatggtctctgcagaaatgttttagaacgtattctgaatttttcacaaactcttccttsaatgcctgctgattgaatggatacaggtcgtacaggcaaatacacgctatttccatagtactgagtatattggactaaatctaggcaaaaagctgcctaaaatttatactgtaattggtcagctttatattatggcagccttctcgggggaggaacattgatttctagtgactgccactgagttaaatacattgttaatagcagaatcttttgtgtgtaaagagcctgcaacccacttctacctctgtgcatgtgtcttagttgctaacaggagaaacttatttcttcttgtgttttggaggacttgtctgccatcaaagatctagggattatacagtggatctgatcaggctgttgtctgcttttgagccttccaaattacatggcttaataaaatgattgttttctgtgctcagaatatttctgttgtgatccttatacttcattttctagttgaaaaaagtgttgttttgcctttgctcttatgatacaactaatacatttttattggtaggaacagtaaaaggtgcataggtaaaacagtcatacttaatccttttggttaacaatgaattaatattctgatgcctagcacctctaagctgttttctttagacataagttttataccgtatgttctgtgttgtaatctttttatttcatcatgaacatctttgtgtattacatagtttgcaatatttttaacagttgtgtgacattccattttaaaccagtcgtattttggacatttgatcttttttttagccttgtgatggaacagtaggtctttttcagtcttttactattatacatggtcatgcagtatggattcttgtggttaaatatttgtgtacatctttacgactttctttggattaattcctagaaatggaagttatcaggraactgcagggctatggtgaatttktccatcctgagatgtgttgcaaacattgtacactcttattttcaattaagagtttgagatgcttgtaaaagagaaaaaattttcattttgacctgatttggtttcagtcttgtgcaacatagggatgtgggccagtttgatctggagagattctttacctctctctacctgatagctgtgcctctgagttggcatagcatcataactccagtgtttttactttaagcattttgcattgctcttcattctgtattgtctgtgtccaagcttgtagagctcaagattgtagctttaagttctcacttcttttgggattttcttttttcagatcgtaaagctgaaaattgaaatcatgaaagtagacaggactaaactgaagaagacacctactgaggctgtaagtatccaaaagtttactttgcttattttttcttcattaaaaaataaaaaaatatttgtgaacagttcatccatgctcttcaaatctcatcacccatatatacaaaaggcagtaaaacaacaacttgtctagaaacagtaagattttcttttgaacttccctggatcaaaaaaatggatagccaagagaccagtggaaagtgaacaccgatcagttagttcttcgtagctgtgtgtgcctgaagtcagctctcaggctgctgtgcaattccttcctatgcagaaaggatgtgtggtataatggaaagagcagatatgggttcagatttttaatgtacttctgggatcttgcaattttgttttttagaaaatgaaagtggtaacatctttcttactagtttttttgttaaggccagtgttttagcttgtctttattactgattcttaatcacacaattcagcttaacttgtgtattgggtggtcatatcaattaaccctttgtcgacagtagaaatcccagctttaatctagtaatattccaccagctagcttgaactgctttctaaggttgaggaagtggtattgcattgtgatagtcctgttgaccccttgtgcttagttcagagagcacaagctttgaaattagacctaggtttgaatcttaccagacttttgtggctgagaggttattaacttgcctggtttccacagctgcaaaatggggctgaaaattttttccttcttgatgtgaggcaattgcttagcatagtatctggcacataagttagttcatatcgtaaatacaagccacttggttttcaaaaaatgtaaaagtacctggcaagtatcaccaaaagataacaataacattttgctgcatttcttccagttttttttgtttgtttgtttgttttgagacagggttttgctctgtcacacaggctggagtgcagtggcacgatcacagctcactgcagccttgacctcccagctcaagcgatgctcccacctcagcttcctgagtagctgggaccataggtgcatgccaccatgcctggctaattttttattttgtgtagagacaggatcttgccttgttgcccaggcttcttccagtcttttaaaaaattattacatgtgcacacacaattatcctgcccttttcatttagcattgtactaatgagtatgagcagcactttcttcatatacccttgtcagtattacagattgtcttttaaatttttgttaatttcataagtggggaagaaagtatttcactgttctatatcagttatcttcttgtgccattcattttgtatctgacattggaatatcagtgtttctcttactgaatgccatatatattgaacgtactcattttcatatctgttggaaatatcttcatttgcttttgattttgtttttgatgtgttttggcatctagaagttttgacaactgtgtacttgaatgtcttttactraaggacaaaaagaaaacttgcttaagaaactataatttaaaaatttaaagtggaaccaatgtaagaatctactgctacgagaatagaagacctagaaaagtgatcctagtgtatataagaactagatatatggtaatagagggattataaattggaaagaagggacagtattaggaaaccatgctagaatgattatcttgtagagcatgtgggactattatattgcgataaattttagataaaccaaaagtcaaatgtttttaaaagaaataagctataggagaagtagaacatgtaggtgaatgtttactttgtcttaagtgggcatggtctttccaagcattaaaacaaaggaaaaaaaccataatggaaatgttaaatactgtatccaaaattaaaaagacatgacaatagccatcctaataggtgtgaagtaatatctcattgtggttttgatttgcattcccttgatttccttgatagggagcacctttttatatattttaaaactatttgtatgtaaatagacatctggataaatgtctattcaagacccttgcccgtttttaaattgtgttatttgggatttttttgctattgagttgcaggagttccttatatattttggaaattaatccctggaagacattaggcaaagtgaaataagtcagccgcagagggacaaatagtgcatgaatcctcttatatgaggcatctaaaatagtcaaaggtgtaaaggtaggcagtagaatgatagttaccaggaaatggtgggagagagaagggggagttgctgctcagtgggtataaaattataccaggcaagttcgttccagagatctgctgtagaacaacatagtgcctatagttaacagtcaggtattgagtatagtctgccctccgtgtgtgggttccacatttgcagatggaaccaactggatagtaaatatttgggggaaaaaacaataaaaaagaacaatacaaaagtaaaaatagaaattttgaagcaatgcagtgtaacagctatttacatcgaattcagtattgtaatactagagatggtttaaagtatataggaggatgtgtataggttatatacaaataccattgccattttatacaaaggatgagcagcatagattttggtattcatgggggtcctagaatcaatccccagtggatacagagggactactctacttaaaaatttgttacgagggtagatctcacgttaagtattcttaccacacacaatcatgcacacacacgtagggacacaaggaaacttggaggtgatggatatgtttattacctggattgtggtgatggcaacgtgagtgtatacatacatccaaactcacccagttgtatgcatgaattacgtgcagtttttttgtataccatttaccccttaataagctcaggtggggtgggggagggggaagacacatgacaagctggggaaaatatttgtaacccagtgtagttaatattttcagtagctaaatcaggagaaatkaatatcccaatgacaaaatgggcatagggcatttaagaaaagaacaaacccagtaaacgtccagcaagattcaacttagcgggtaattggagaaatgcaaattaaaaaacaatttttaacctagtggattgtaaggggttgctcttggagtcatatactgatttctggctcttatttcctagttactagcaagttacttagcataaactcctagaagtggaatttttatgtcactggttatggacatttttaagacttgagttgtctattttccttgagcagcatacatgattgcccccatttcccatactgtggtcaatgctaggtactattatgaaaggcttttattgatcactttgtgtatcagtagctgtgcaaaggattttttccccagatttggtatctattgaaataaatcactgtaaaccctggcaattgttattgagctatcgaactggcaaatgctttcttatatcttaacgttgtgcttgctgctttctcctgcaaaatgcaagggaccttgatagtctgataaaacagagaccatagtactggtacattaaattgatgccattatgctaactggatcttgtgagcagaaaacacaagcacaccttagatgcctcagacatatttgtgccagagagtcagaaacaaaccttgtggaagcttgagggccttttcacattaggaaagtttctagtggccccagggtttgggaaatattgggatatcccttctaaagtgagagggaagttgctgtaccttgtaccacacactgtgaagaaagaggaacaatgtgtgatgcgtttggattttggagccaacatattggttggtcacatttaggcatgctattttgacctatttactggataacctctaacacatttagtggggaaccactaaagtgttagtaaggtttggatctagaaaagactctgcaaaaggtccaggctatgatacaagttgccctatcacttggacattatgacctagtagacccaggtgactgacttaggtgtcagctaaagatgccatgttgtgcttttggcaagccccaatagaattacaagtaagacccctagattcttggctgtgctgtcctctgccaccagctattctacattcacaaaagcagcttctggcttgctactgggccttggtaaagactgaatgcctggttatgggacataccaaattattacaggatccaaatgttcatcatgaactgcatcttacctacacatcgtaaaattggatttgtacagctgcattccattagaaatagaagtaacacgtttgatgctggacccaagtaggtccagcaggcacaagtgaactgcataagcaggtggttcaaatttccatgttatctatttctgctgcttcactgcctctccctcaacttacatcttagaggagaagaggaaaaagtgcaggcctggtttatggaaggattttgtgccaaggattttacatatatttaattaccatgaacatttgaggtagatcttaataatgcttagagggagaaaaggtttggacttagcttaaagaaacccctgttaggttccatgttgtttcagatgccgaaaatacgtttctcccagtttgaatctcacgacagcattgctggatatataggtacatgttagtttattttgcagaagaggatgctgagattcaaagaggtagcttaccaactacctgattccaagggtcatactctttttaatagtatgctgtctctgaatatttaagctcctgtaatgggagataagtattttatgtatgtggcagacgtttgagtttcatatttgtgaggtagctattaggtctgtttttctgataagagagctgtggcttagaggttagacttgctcatgatcaaacagcttagtaaacatgaagttaaaaagtgaatccagacttgtttggttccagacctctggtccattcccaggatgctgtactgcctttatggagttaaagaacaagtgtaataatcacttctcccagctgccattcattaacggaaggcttctctctcccagcccctatccctttccctccttccactttcagaaacttgactataaatgctcaatccactccttgttacctgacaaatggacccattcatcagtagaagagagcagaaatgtatggaaataggaaccccaagaaagaatggagtcctagttttacgaagttcggaagctgtttaccatcttacaagtgaaggattttatgtaacagaaaaatatagctagtgctaatcttcacctttaattgtgaattcactaggacttttcagtctctgattcaatataacctaccaggcattctggttaactttcagaccatggtatagattccttaattgtttttttttttttttttagatgtttaacttattattgtttttgttgtcagcacctttccaaatagtttgtctgcatctacctttatccaaatccaaggtgggtttttgttttgttttttgtttttttttgtttttttttgttttttaagcccaggtggattgttgggggaataaaagcattttctcatgaggtttccattttaatcccaagagattgtctggcacatctcgttttcttaagtagtaaatcctagcaaaaggaaaattgctgtgtgagcttaagggttccttttctgattctccttatttgcaactccctcattccaaaacatcttttgtgaatacttttcttttctcagcctgcagactgcagagccttaatagacaaactcaaagtttgtaatgatgagcarcttctcttggaactgcagcagatcaaaacatggaacattggaaaggtatgtgaagtcaagctcccaaaagacaggactcaccatactaatacatcattttgtatgctctgatatggaataagaaaccacaatgggatagcctcattcagcaattaataagcatctagcatgtgccatgtgcctaacacagctttaaaccagtggcaaggaaaattttgctggctgaggatggagaattgatttcacaggtgatgcttaagaatctcaatcacagaattcctgtggtttgacaatataagtttgagataatttctggatttttagtttagaagaatttttattagataactctaaaaatgaatttttctgataaaatggattctggcaaggatagttctcttgtcttcgtagatcttagaatgtaaccggagttctccatctaaagacctagctctaggggttttatggtgtctattggtgttagcacatatatctagatgggtatgacaatgaactacagcacttttagctcagagtatgatctttctcatatgggcaagggtgggacgtgaacttgtctaggtgtcatgctcagcaatctcttgtaacaaagctcagttagaaagcacccatgcggcgcttctaccttattcttacatcctctttttcctcccctctccagtgcgagttatatcactgggtggacctgttggaccgcttcgatggaatactggcagatgctggacagacagtggagaatatgtcatggatgctcgtatgtgataggccagaaagagagcaactgaaaatgcttctcttggctgtgttgaacttcacagccttgctcattgagtacagcttttcccggcatctgtacagttccatagaggtaggggaggttaaagcctgtgtaccctgttcttgactagaattgtgtacatccagaaataaggaaattgctatttctattgcttctttccttttcattgtggagctctgggtttttcattgtcaaagataatagtagaatgtttcttggatatagatactatccttcatagggttgatgggaagattctgtactatcacctttgctttgccttttcaagattcaagaaatgaatgagaaatgttatatatgtattaaagtatttaaggaaatttgcatgaattgatttttgccctaggttgttagagcagccccacattacttttaaattcctagaaatagtttgattttctcatcacattaatgtacttactactcctctaagtgttagtgtgctgctttaaagtctctctgtactctgccacacccatcccaaaatatatattcatagcatcctttgtgtccttgaagagtaaggtaggtgcagcaatcagtgagctttttaattggttaaaaatcactgtaagaagaaattattttctttttatagaagcccaactttagactttttatcatcattagttaggtgccctgttaattttaggtgtgttttcctacgtcttcagtagagaaacagaatcagaacaaacaacttaaaagaaaatggcttaggaaaagaagtgggataactgaactaaaggcctaacatacagagctttaagtgggaggtaaataggcagtctgttgaagatgaaatagatatgctgcccatggaagtccatgaccttcggtataattggcaactggaaatgccttggttcatttctagctatattacatactgattttaattctgaccaactgcttcaatgtattggtgaattttaattgtatttaaaagccaaagtaaggccaggtgcagtggctcatgtctgtaatcctgacactttgggaggttgaggcgggaagatcacttgagcccaggggttcaagaccagtctgggcaacatagtgagaccccatcgctacaaaaaatacaaaaattagcggggcgtggtggtgcgtgcctgtagtcctagctactcgggagacttcggtgagaggattgcttgaacccaggaggtcaaggctgcagggagctatgatcatgcctttgcactccagcctgggcaacagagagaccccgtctccaaacagcaacaacaacaaaatccagagtagtcactcaggttccttatgagcatatactgtactgtaacacttatatgttatataattgccacgagctgttatcgatatctttagcttctatatgaaggaccctgttttaattaatttcaattttatgtttgtcataaaggatacagaagagaacataaaatatctttctttcacaatacttttagtccagttagagacttaatgttcttcttgagtcccacatgtgtatttgtctcttttccttcctgtgggaaaacctgcgcaattttgaaccactatttacgttttttacttttattgcactttatagctaactgccagattttaagctccttggggataaggttgcatgttgtagattatcaaatacatatatatatatatatatatatatatatttttttttttttttttttctttttttgagacagagtctccctctgttgcccaggctggagtgcagtggcgtgatctcggctcactgcaagctccgcctcccgggttcacaccattctcctgcctcagcctcccgagtacaaatacttatatattttttgtattgttgtgactaaacttcttgatagctttgtaaatgttgacaagtacattttgttttgttttcaaggccagttgtgcctgataccttgagctttgcccttttttgtccctttagcatttgacaactttattggcttcctctgatatgcaagtggtgctggcagtcctcaatctcctatatgtatttagcaaaagatcaaactacatcactcgtctgggatctgacaagaggaccccgctgctaactcggctacaacatttggcagaggtgagtcttgggtgaagagttggaggggtgcaaaaattggagcatatggttcctttcaacaggtgtttcttggagtgttaaaatatattagaatccctaagttaacttcactggcctaattgagttagaactattggtgccctgttttaaaacctaagtattctcagttattaagtaattttgaaggaattctttaatctctgctcaccaaacaaaatctctctgttcaaaagtggcaatttcacttctgaaaggaaagttcaaaattagattcaattctgtgtgagaaggaagtataatgcaataataagatctagatttgagtcctggccctgcttactagcgccgacactggtttcctcttctgggaatttaacatatctacttcagggttgatttagaatgaaatgaattgtggggtactcagtgctgtgatcagtaagtcgtagtgattgtaattgaagccagaagctctcatataaaagttcagctctaccaaactattgtccagtgttcccagaggcaacttcttaatayatacttagctttgagaggtaacccactgttggaaagctttcttagaagaaaagtgttatggctggctttttaaaagcatatttaatgcttacctcaaagtaaytcaakttttcaggctaattcaggtgccatgattacttataaattagttttgtataattataaatataacatgtattctgaaaattctaggaaaatgtagacaaaatgtcaatcacctataattcatccctatgagacctcccttaaagttggagcatttttttcttgcatttggaaacacatgtatacatgcatgtgacctgttttcttaagatactgtaaatatttcctcttactattaaaaaccacaaggaggtttaacattggattcccaagtccacagttaaaaggaaaaaggaactattactcaatagatgcttccaaagcactcgataaaatttatctcattaacaaaagcttcatataaactttaagaaaactagagttacctaccagaagtcataatgggggagctgaggcatttccattggattcaaaagtcacacaaaaatgtcagacattaacttctgtcatttacatttgtagtacagatgctaaccaacagaaaagaaagaagcgaagaatacatattaaaagaaaaaatttgggctgggcatgatggcttatgcctgttattactggcacttggggaggctgaggcaggcaaatcgcttgagcccaggagtttgagaccagcctgggcaacatggcgaaatcccgtctctgcaaaaagtacaaaaatccgccaggtgtggtggcacacccctgtggtcccagttacttgggaggctgaggtaagaggatcacttgagcctgggaggtgaaggctgcaatgagccagkatcgtgctactgcattctagcctgggcaacagagtgagaccgagactctgtctctaaaaaagaaaagagaatatttgttactatttgtatgtaggtgatgagtctctttgtttcttggggagataatgtaaaattattataactagtaaaagcacagtgaggtagccaagagatcaatatacagaaacagatagctcttccatgtattaatagcaaccaattagaaaatgattggtgaggccaggcgtggtggctcacgcctgtaatcccaacactttggggggccgaggcaggcagatcacctgaggtcaggagtttgagaccagcccggccaacatggtgaaaccccatctctactaaaacaatacaaaaattagctggacgtggtggtgggcacttgtaatcctagctactcaggacggtaaggcaggagaatcgcttgaacccgggaggcggaagctgcagtgagcctagattgtgccactgcattccaggctgtgtgacaagagcaagactctatctcaaaaaaaaaaagaaaatgattggtgaaaagaccccattcacagtataagcaaatattctgtctgtaaaataagtcatattggctaaaactgtaaatttaagagcagttaatgtaggaggttgtgttgtaataacaatggtggggaaagaattcttaaaatccccatggcataaacctgaaagtaaaattttgaatattgtatttaaaaatatacttcccaacaaaaaacacatagctccaggctactccttaggcccttacactagaatataaatcaacacactgcttccttcatcaagaaaaatgtcagttgtactaaatagtatagttaccaatgtagttaaataacattctggtacaacctcattttgtcatggaccaataaaacttgcaaacaattggtgtaatagcaagcagctggtctgcatacaaaattaggcagcactttgtacaacagaagttaacagacccatggtagattaaaaatgtttaacagtgttttaaaactgaaaagggactgctaatgtagaatatccaaggaactcttccagatcaacaaggatgagcaaaggatatggataggcaatttatagaacaggaaattcatgtgagtagatgcccatactcagtaattagagaaataaaaataaaacaaggtacagctttgtaagcatcagatttgcagaaattagaaaactatataatggtaagtcctggcaggtatgtgaagcaatgggaaccctcatacattgttcataggagtgtagactggttctcatgggtatatatttcaaaggtgagatcgcatcatttccataaacgtgatctctgtcagagtattgcatcatcatttgtggtagtgaggagttggaagcaaccttggtatccatcattagtagatactcaaataagtaaaatgtggcacatgcacactatggagtatgtagcagttagaaacagtggaccaaataatacagcaacattgatggcttctaaacatagtggttagtgcataaaaaagtaaaagcaacagttttcattgctcagtaccatttctgaaacttaaaaagatgtacacaatgcaacatatagtttcaagaaagaaaaattaacagacatcaaaagttatacctttgatagaagggaatctgaatgggcaataatgggacagatacatgaacaagtacagtagtctccccttatccgaggtttcgattgccatggtttcagttacttgcagtataatacaataagatatattaagagagaagccacattcacataacttgtattatagtatatattaaactttatcatcagtatgtatgtatagggaaaaaatgtgtgtgtgtgtgggtgtattatatagggtttgccactacctgtattttcgggtatccactaggggtcttggaatgtatccctatggataagggaaaataaatcttaccagcagtatttaagatctgttagaccaacactaaacctttacttacagatttaaaagatggtctaaatagagacaagtaacattttttaaatgggaagacttaatgtagtagaagccctttaatgaaattaggaccaatgattggtagtttaattattttaaaaatcttgttaaagcaggaaatgtttaaaaagtgattgatacatatgattttttaaaaactaaaataattccctttcccatcttatgtgggccataagacttagtaagaagcagtctgttttctgacataaactacaactataatctgtgattactttatggtgttgcaccgattgaagaaaaggagcctgcatacaggattctaaattttttagagtttacccctgaatctcttcataatttgacactttttattttagcatcttgccttttagatgaatattttgcaaaatattcgacttagtttttgtgaaataattccctttctcatttaaatcagtcaaattgattaagtggaagtctgttaatagcatcaactgagacacagaaataaatgagaaaacactgataatgaatcagggtgagttgctgtatcagataatatcataaagctatagtggttttattataaagccaagtttttatcataaggctttttatgattaagccaagtcttgcagttggcacaggaatagacaatacatctgcaaaatgaaagagtataccttatgttgcttagaacagtgggacagtaggctgttttgaggggaaaatgtgtttagaacttttcttcacacttgacataaatcctaggaacgtatttagaggtaaatacaggtgacttttaagatctttgataagagtttgctaagaaagttaacagacctagaagtcattaaaaatacagctttgatcatgttaatttggttatttgtataggaccacaatagcatctgacagaattcacatcaccctacttttaggctgatayaaacacactaatatttcatactttaattaaatgttctgacaatttaagtagaagttaaaatgcaaactgtttttggtataagtggctcacatatataaagtatcgggtatgtttctttgttttgttttttaggtaattcagatccagttgttgttcttcctttggatgattttaccacagaaaggactgcttaaatgattgcttttttgtccctttgcatttttgacactttttacctttaagaggcttgctactttttgctctgaattgatctaaagagattgtagattggaggttaatttctagtcctggagaatttggaatcttgacaggtgcagtacattgcagcctttggtaatagattgatgtgtttggtgctttgcaataaaagatttttacaggtttttgaggtttagagataattaggtatttagtaatggtacctccaatactaatatccctcattaaaatttaaaaatttcatgtttctctaaaatgtaaaatttctctaaaaacttgacttgttcatgtgggcttcttttatttatgtatttattttttttgagacagagtctcactccattacccaggctggagtgcagttgcacgatatcagctcactgcatcctccgcttcccaggctcaattgatcctcccacctcagcctccctagtagctgagactacaggcatgcaccaccacacccggctaattttttatattttttgtagagatggggtttcrccatgttgcccatgctggtctccaactcctgagctcaggcgatccactcgccttggcctcccaaagtgctgggattacaggcgtgagccactgcctgtccttgtgggcttctttaacaatgctcatagaaatcttggttcatgtcttttcagtcttttcaggcaacttcctttgcaacaaacacattcacttgcatgtgtataagaacctggatttggatgtgaaacctacttttgccaacaaatattaacctgtttctgtgtctgtaaattgggggttacaatatctacctcatagtttttttaggatcagagtaaaggaagtcataaataaaacctgtagggttaatgccatcatgttggaagtacttaataaacagctgtcatttgtagatggatgtcaaccagagaaactacatgccattcttttgtatttgctttcttttaaaatgttacacatgcattattttataagtgcatgcatattgtcacatgattattttcagtacagccttttccctcttggttcacctccccataacctcaaatgtattcttctctatatattatcttcatattatattgactgttgagggtgtttttgtccttmagttacaaatgcaggataccttacatccttgttttcttatttcagaccttgttcaaaaatcactttaaagtcacctgtataactatagggttcttttgatggctgcatagtattccatgctttggatgtaccatattttactcaagttccctattgatgcatrcttatatttgttatgaatgatgctacattaagcaatcttatatatgaatttagttactgatacatttaatatgatattataagagatgatatggagatcataagatagagtcccagaaatctcagtgtgactttattggcacttcactgatcagtaatgattttgagcatctttatgcttggccattaggatttgttcttgtgaaaggttttatcttttgtccatttttccatttggttactttttcctactctgtaaaaccatattggagatattagtcctttgtcatcttaaaagtattttttcccctaatcttcatgtatattgtctttgtttattgtgttttgtatgtgatgttttcaaaaatggttcagtcaatgcttttatataaaagattgaatatcgtgttttggtctttatgaaaagtgactttggatatggtgtctttcctcatagtagtttttaatgactaggtcaacccagtgatgtgggctaattgtgaatgtgaacagtgattagttaactacagatgtagggaaaattctccagaaagacttgttgaatcagttgaaagccagttggctggcttttgtgaaggtctggtatactctaggtctagtaaacttgaggatgcatcagaatcactttattaaaaaatatattagtcttcctcacctccatcccacctaactcctgagttgctgattcattaggcttggagtgggcctcagaatttgcattgctataaagttcccaggtaatattaatactaacctgctggtccagggagaaccactggcctagtctattttattaagttacaaacttttatcaaattcttataattccatcttagagagcatcaagcctttttcctgatgtctgaatatttagcaaatcctgtctagtgtgaggtagtgttgtatatgcctctgtggcataatgaatatagttatttatgggttatctacttaagggctaggatgttacagtaacactaccagataggtgaatactgtgaggctcagaagttacttatgtattttttttttgttttttgtttttttgagacggagtctcgctctgtcccccaggctggagtgcagtggcgcgatcttggctcactgccagctccacctcctgggttcatgccattctcctgtctcagcctcccaagtagctgggactacaggcgcccgtcaccatgcccggctaatttttttgtatttttagtggagatggggtttcaccattatttttggacaaaggccctgggctctttgcttctgctaaaatgtgaagaataatatctgttcttcctgtcttaggcatttggggattctttgagcatggtcatgttcgtttttttaaataaaaacaagcttacttagtacttgagaaagcaagataaatagataataaattaataataataagggcaaagaactagtgttattctgaatagtactgactaaaaagtaccctagaatcttaacatttaatatgttgattttgttggcagcgaaacaaacttgtcttcctgataaaaataggtgcttggtgttttatgtatgcaacaaaatttatcataattgtgtatctactcattttggtatattttcttagtctttatctgatgaatatttcttcacaagaaacatttctttatatttcatataatgttactagttcataaatataacaacagcacagactttcgtgagtcacgtttgagttggcagggttttttaaggatctcagcttaccaaaactttctaattaaaggtgcttgttttttatcaagttgcaaaagttggcaagaaggattttgtggtgacactaataaaagtattctgaaacaattagttggaataacagaagaaacaaaaggaaaataattgtgtagatacacagcctttcaagcttattctgccttgcagattcagacttttggtttgacttacctgtctgttctctgtagcatcaagcctttataccctcatccttactttatggttttcagcaaattgcatgtgtcttcgtcttcactagatgtcctgggaagagccaagaaaatattgaaaatgtaatgaagtacttattaggtattaaaccattttataaagctatagtaatttaaatagtgtggtaattaagagtggaattgaccaatcagtaggttccagaagcagatccaatgtgtaagaatcgaatttatggttaagatggcatttcagattagcagaaaaagaatggattattcaaataagatggtgttgtaaaaactggcttactctttgggaggcaattaaggtagattctacctcatcaaagtaaaattaagatgtaataaaaagctgaaatgttaaaaacatgaagttatacaagcattgaaagaaagtataactgcatggttgtatgctgcttgaagtggcaagatattttcaagaatgagactaatgccatgaaagaagaaattgattccattacagtatgattttataccttctgtctgtgaatattttaggtactgtcaattgtgccatctatggttatctcaatttacttcacagttttcttcttacttaggtaatttccagtatttttctgtggtaaataatgctacagtgaatatctttaatacgtgactatttggccatatttagcaccaggtgtttgttaccttttttggggtctcactctgttgcccaggctggagtgcagtggtgcaatttcagctcactgcaacctctgcctcccgggttcaggccatcctcccacctcagcctccctagtagctgggaccacaggcatgcaccacatgcctggctaattttgtatttttagtagagacggggtttcaccatgttgggcaagctggtgtcgaactcctgacctcaggtgatctgcccgcctcgggctcccactggctgagtgctgggattacaggcatgagccaccgcacctggccgtctgttaaacatcttaatgaatgtcgaaccttgtattttacagattcttgtctcattgccttaaacttccctagttgttttaaacttctgattattttttagagttctgatagacttgaattccgacagtcagtttattcactgtttttgtgaaggtgtgggcttatggggttccccattctgccattttcactgacagcattcctagtagaacagtctgtttttaaccagctgggagtgggggatatacatatctgtgtccaggcagactttctcacttaggttttcactagagaagtaagccctaatgccctaaggtatccattattaatgtagcaaagagacttctctcttgtgcatctaaggtggtgctagttatgtaccattatttggagaataaaatgatcattcaccatgttctgtgtttcatatatgatacctggattgagaaatgctgccagtagatcaagtgtagtttgagaaagcttatttctcacaggatagtcagatgatgttttatttattcatttatttatttacaggtttagaaatagcattctatagtakgtacctttgtgactggcatcttcagtggtttacactgtttgtttttgagacttctttggcaagtagtgatataatagcatttaacaaagaggaaacacttagatgtagagagagagccatgttagttcatggtggcagcccagatccgaggtgattgggacccacactagacaggaataaaatgaagacatagaatataagtagcattttgtgcttcaatcatgccagacttaaaaatatgataatgcttggctgggcaaggtggctcacagctgtaatcccagcactttgggaggccaaggcagaaggatcacttgaggccaggaatttgagaccagcctgggcaacatggcaaggctcctacaaacatttttaaaatgtagcctggcgtggtggcagcatatgcctgtagtcctagctgtgtggcaggctgaggcaggaggatcctttgaccccaggaatttgaggctgtggtgagttgtgattgtgccactgcactccactccagcctaggcaacagagggagaccttgtctatctctcacactctcttcatatatagctacatatatataatttttatttttataaattttatataaaatttatataatttacatatttataattttttaaaaatatacaaaatatctttttatatgaaatgttttatatttgtaatataaaaatctcttcagtttgacataacaaattaataaatttgtttcaaataatatctcatttctttcacttcgtcaattgtttgcctgaactatatgccttgccccatgaggcagggagatatatattttttacatatataaatacatattttatgtaatatatgtaaaataattatgaatgatttaaaaataaaaatacgttaatgctcttaatgttaaagtgatattttaaaggctgttaagatgcaggctagttagtaagtgagactatgtggctgaagttttgtatttagaagccagttgagccactccccccattatctcaggagcttgttgatgaggttttagatttgagtggcaaagtacagtagtaataaataaggtagaatctgctttgtaactcagctcatgtcaaaaagagaggaactggaaagcatgatttcctccctagtgctttcctccctagtgcggaaggtgagtaggcagagcctcaggcaaggcctgataggacaggagggacctgtcagcacacgtgactacaggggtatggaatataatggctggcagttgctgcttgagttcttcctaggagcatcctcactgaacagtgaaattgatctcattgaagaaatcacctttaggcagaccatcttgccttgattcttaagttcttatttctgttcgttttttcctcttgtttgactttcacattggatgtcttctcaacattatgttccaagcagccacacactcttaaatatatatatgtatgtgtatatacatagagagaaagagagataaggtctcactctgttgcctaggctggagtgcagtggcgcaaagtcaccataagcactgtcttaacactatctttttcctttttcaagagctggggtggaaaggagaatggctttggacttgcagaatgttgcagagacttgcatatgatggtaagtaactctttgggatatgggtgtcttttgacagagctgtggcctctctgtgaaccttactttacaatgaattgtggtatatgaagtgacgccttcacatcgagacctttgaggaacctaagatcagttcagacatagctgaaccacgtctataggaagcagtctagcagtgcttgggctcttgatgtgctggtggtagataaaaaaatctgagaaatagagtgtgtgttcatacccagttcttgagtaggtagctgtatttgttgaattaattttaatgtgattttttttaaatcccagaaagtatgttcgcttgcattctcacactggaactattgtatcagaactctggacagtgtggtgtgatttaggaatggctgcttggagagcagttctaccattaggtttattgagaacttataatgttttatgtgctttccttgtttatctctctgcctttcacccatgtttaagttatgagctcaggccatcctcctttctgctttgatatgttgctgtggagctacaaaacacaatttgattttcaataattattttgcatctggaagcaactatattttccacgtgggatttgtcttgtcagtttgtcgtgtttagcacaaatggctgcagtgaaatttagtgtatttatcttagcaagcctttttttcctaaagagaatggctcttttctggtctcagaaaaccacagattagatcaagttactttcccacgttagctggcatacttttctttagtgattattttatgaagagatattgggtgatacagtaggtgagtgttgtctgtttaataatcaaaactacataaatcttgaagtatattcagagtttggaattctaattatgacaacataaaggttaacgtgtactttaaaaggaagtaatacatatacatgttaaaaaattcagagtataaagaggtatgcagtggtaacttcttaattttccagaggcaaccactgcaagtggtgtctttcagtgagacattttagtgggcattctgctgtcatcttaattttgttcatcatgttgcttttctagagttaaagagaatgttttgtcagggtctggtttatgttgtcttggtatctacctgtgcagaaaacataccatgagaagtggtgtagaatggtatagaaggaaagtgtttgaagaattatgaagatatgcctatgaggcatactttgaattaaatatttcagaaggctgatgataggtacaaggtttttcgtaggaatgttcttttccattctttagctggtttctgggccctggtatttgttctccatcctttcttggattcttattcattactgcttggcagtcttgcccctcttttcccccttgggaatagccacagtcaaaattgatctcttaaagggaaactggaaatttataagtatgaaatgcagaaggtttgggagctctgggctctgtccttttgattctgtttgaaaagtctcatcctatctgagctctgctctaagacaaacagttaaaggcactgtaggtactgaatgtactgcttattcttctgccacaataagttgaacaagtggctaggactttgagggaagatgtggrggataatgtttataatcagttgaaactcaatgtctgattctttgatgtgctttatacacagaaatatccacccagtgcaactacactacactttgaattctatgcagatcctggggccgaggtcaaaattgagaaaagggtgagtctgattcagatttgttctgacaaagtctacaatttactgtaactgggattgcctcttctagaactcctcagttaaatgaataaatggttttgagctacactgctgccctcgcaaactataaatatacctagcagctcctcaggagtgttaattgcatccccaactctgatagggttgggtcttatgttgggagctgccaaaagatgcaagtcccatccattatgaggcactgctatgacctatgtgcttttcccacagtctctgagaattccaacatgtagtatagtagtttggatggtgatggctcaggtttctctaattaggaagcctgcaaaagtctttatgtattgtggatagtgtcctgcttaaattatctggtcattttatattgtttgaggaggtactaaagagtttggtttagaagtagcttagtgaaaatacaatttctcttctacctatactattcaataaataaataatctttctagcttaattgccttgaaagcaactctaatacatattcagagagaaaatattttcatgaatttggtctttgctattaatactgctatggatattaagtcagtggagggttaaaaaaggacaaagaagaatatgaaatgtgcctggctatgtgcattatagtttgatactactggttttaaaggagctttcctaagaatattctacatataagatggatgttttggaagattctcaatttaccttgattttaagagcattcacttaggcttcagcctattaggtgacatcttggttttcagacagccctttggagctctatggaaggggaagctagagtgttcagtgactccttacagctctcttgtcttttttaattttagacaactagtaacacactacattatattcacatagagcaacttgacaaggtaagaggaatctttgactcttggctcgtttcttaatgtttggttcactttttgttcctaactatatctttttttttaatgtagatttcagaaagcccttctgaaatcatggaatctcttaccaaaatgtacagcattcctaaggataagcaggtatgatgtggctttaaaacatccacaggatgtggttgttatctaaatagattaatgatatgtactggggtgggagattgcatagcagaaagaatgtcagctttggagtcagaccatgggcaaattgttagcttctctgagccttagtttccttgtcttttatgaggttaacacttaataacttcctaggccttatgagagtttgaggaaaacataaactacctcaccgtgagcaggtaataagtggtggtagctttctgaacacttcggatatcaaaggagaaaacgtttagttgtgttgttttttgagttagccctcataaagaatattcacctttttcattgatgtttttaaaatgtatgtcttatctctctacagatgctgttatttacacacatacgactggcccatggcttttctaatcacaggaagcgattgcaggcagttcaggccagactgcatgcaatatctatattaggtaagagaagaatactttaattaccaggccgtattagacagtttgggcctgatttcctttgaacttcattcatctttgttgctatgagtcctattatagttacctaggtagcaacttaaatacttccacccctcccagtgttcactgtatttattcattatccttgagctccttaatgttggacgagaaagagggtatgatgatgttgattgacatgtcacctgggtttattcttggtattcgtctcttttttttttttttaatagatatgcttgtagctatcgttcactgtccccctactctttctcttgccattgtgtcttcctcctctctcatcctttcagggatatcatyttgaattaagtcacaaaatattcagtagtcaatactgtgcatttaacttcttttactgtggcacagtaaaatggaaaacacgtggttttgtaatcagtcctgtactctgtccctgattctgtagattattagccacacttatcctctcagcctcagcttattcgtttaatattgaggtactcaccgtagaggctggtctaaagattaaatgaaaacctagaaagcaatctagcacagaacaagcacatagaagatataaaatggtaaccattgctgttattattgatgttcattatgttatgacttgccttctcttaaactatgagtttcttggcgtgaaattcttgctcttttatgtgtactcatatctagcatgatttctggcatgttagtgggtgctcaggaaatctttgttgaaaactaaatgaatatgcctaaatcccattagtttatgcttcagggtactgtgtccggtattaacctcatcgtggaattcattgaatgtgaattacacacattctgaagttttactacagtgtcacacaaatttctgacttactctgcaatggtccataaattctgttctttacaagtgtttacagtaaaagcagaagcataggaagaggctaaaatggaaatcttatattsaaggcatagtggagttacatcaagtagtaatgttatgaaaaattaactcagagcttttcctatttccatccccaaaattctttctcaagactaataatacctttagtagtggaatctgtcaattcagtgtctgtttagagattatcagttgkatttgatccagtccttcagaatttaatttggtgatgattctgccctccattgctggttgggaatggaattcttccccagaacctatagataccaaaaagtttgttattgggcagtggcttgaccactgccttcttgcctaaagtgtttgtttctccttttgcagtgtattccaatgccttgcaggaatcagcaaacagtatcttgtataatggcttgatagaggagttggtagatgtccttcagataacggataagcagcttatggtaagtattttacaggttgagtaacccttagctgtaacacttgggaccagaagtattttggatttgagacttttttggggggggaggggatatttgcatatacataatgagacatcttgggcatgggacccaagtttaaacacgaaattcattgatgtttcgtatacacattatatacgtagtcttaaggcaattgtatacaatatttcaaataattttgtgcattttaactgtgacctgtcacatgagatcaggtgtggaattttccacttctggcatgcaggtattcccaaagttttggatttgggaatatttcagatttttgaatcagggatcctgcattaatgttctctgtatatcaggcttatacttgtttgccttttggtttttcccagagggttagaaagaactcccagtacttccctctttgggtattaaactgcaaaactaacaaatactagattttcattgttgctctcaacagacctccatcccctcaagcagttaccagtagaatgacttatattttaaagtttggatattagcaactggaacttggttcagtcatcttattatatttgacacattatgtgtttaccttctaatttaataggagattaaagcagcttctttacgaacattaacatcaattgtccacttggagagaactcccaaactcagcagtattattgactgtactggaactgcctcctaccatggatttttgccagtgcttgtaaggaactgtatccaggccatgattggtaagttttgatggtgattatcttaggcaagaagaaacatttgccctctgcctttgtctttttaatatcctgcctgcttaacagcaattttgagcttgtttttgttctccctctccccacctcccttgtagatccttccatggatccataccctcaccagtttgccactgctctcttctcttttttataccatctggccagctacgatgctggtggtgaagccttggtctcctgtggaatgatggaagccttattgaaggtgctgtactttttttttttttttttttaaactacatggggaaatcaactaagggtgtagagatgcaagtttggggtgtttcacagtgagggcaaataatataagaaagcttatccagaaaaagttatacttaagtagaaggccagtttggctttctagttatctaattaacaatgtttaagagcagctacttccattattgagacttttatcatagtgtagaatggtcaggaggtcatgggttctggttaaaacattgccacatgttatcatgcctttacacaaccatagggaaaatatatgtcagggtactttgtaagttgtgttgtagtagtaatagcctttactatgtgcagggcaatgagcaccagcttttttctccctaaatatcttacttaatcctgcaaagtaattgatgtccccattacctcagaggttgagtcgcagaagtcatagaactgtcatttggcaggcaccaaaaataaaacacatgttttcccccatactgtgctgccttactgaggccccagactacatgtatacaaaagcatgcaatttttacaactttgtgtctttatagttcattgtttttgcctctttttctccgtgataggtcataaagtttcttggcgatgaacaggaccagataacatttgtcaccagagccgtcagagtggttgaccttatcaccaacctggatatggcagcttttcaatcccatagtggactttctatcttcatttatagacttgaggtattattatacaaggaatgctttgcacagaatttaatactcagagctgaacctaaggattgtcctgataaccctaaagagcgatcttacagtctcttctgtttctagaaatcaactgtgtatctgcttgcagtgtttttccattataatagtttttaatccctgaaaaaawawatatatatatatatacttgattttcttataacctttctcttgattgtagcatgaagtagatttgtgccgaaaagaatgtccgtttgtgatcaagccaaagatccagagacccaatactacacaagaaggagaggaaatggaaactgatatggatggtaattaacagttattaagtcagtatttttgtgcttgagattttttgtcatcccaccccagttttcattcttcctcataaattccaaagtacacaattaacttgagtatatactttcagcaacaaaaattttttttctatgtaagtgatttgcaaatttgtttttcacaaagataataagaaaagaaaggtactagttctttggagtagagatggcaggtaaagcagatgctatagctgtggtgttaatctgttttatttcatcacgtaattttcttatgtatttcttattgtcttatttctactaaaattcaagctccatgggatcaggatattgtctttttcactgccgcagtgcctgataacatcctaggtgttagaaatatgcttggtagagagagagagactaaaatgggaccttttaaaactttacctattttgagaagagaaaggagaggtaaaaaggttgttgggtaggcaacaacatccgttaggctggcacatcacttgagcccaggggttcgaggccagcctgggcaacrtggcaaaaatcttgtctttacgaaaaatacaaaacttagccgggtggggtggcatgcacctgtggtcccggctacttgggaggctgagttgagaggatcatctgagcctgggagtttgaggctgcagtgatttcaaaatgtaaatagtattttatcactgatggagccttaatacattttataaactgtagtcaatgattgtgtatcttatactcagttattcaagtgtataaagtaaaaatgaatgctcacttacctaccatagctactagtttcggtgcggatctttccaggcttttttatgcatattcaaatacatgttgatgttaagtatgtatgtagtattttagaatgggaagatgagatcataaacatactgttcatcttgcattgctcattcagtgtttcatagacattcttccagatcggaatattgagtattaatcttttcatgctttttatatttattaattactcttttgaaaagctgtacctatttgtatactaccaactagtagtatatgaaattgcacattttacttaccactctccccctcttccccaatttggtaggtgagaaatattgaaggacttctgtaggattgttaatttacacacacacacacacacacacacacacacacacacgtgtatgtatgtacgtattaatacatgcaactagtgatatattttcattttggggttcagtattcctgatcttcatttttatattcatttcacattaatggaagaaattttctcaaacaaaatttttctttttgtggtaccttttattctagtaagtttctttatcataacttgtactttagttgcagatgtggctatggaaagcagtccaggctcatccatctctatggagcacaggctggatgttgaattaagggcatcaggttccagcagcagcactaacatctcttctggccccagccctggtcccagtcccggcaccggcccyggccccggccccggccccggccccggccctggccccggccccggccccggtcctggtcccggccctggccccggccctggccctggcccccgtcctggtgcgtacacacatagatgtgcagtctttcagagtggtagagttattaaactattgaagaaggcggctttaggcagaacttaaatggtacatttggaggttagcatcccatgactattcatgctccttcaccattctggtgttccattttcttatattaacatgtctttcatagcattttatacttttccaacaatttgcacattgattatcaaaacagccatgttggagggcagataatatccaaaatgggaactgagtgaggtaaaaaaaaagttgaacctttttactttgtaatttttcttttttactttagacttttagtattggtaaaattaaaagtattagtaatttttccaatttcaaagcttaattaagtattcttcctaacattcagagacctcacttcgaatgtcttctaattttattatagtgtatttggatctcttaaaattttgttttatgtgcttgatcattgtggtttaatggcgaactcagcataattcttttgtctttcttcattgccaggagtccagtgtattccacaacgagcagcacttctgaaatccatgttgaatttcctcaagaaggccatccaagaccctgctttctcagatggcatacgacatggtatttgattccagataactttttttggaggatattttactctctcaaagattggttcttttcatactattctggcacctgttgttttacaaggcagtctttggtaaaggccatgccattttcaatagcttttagttgttttgtgtcacttttcctagatgtaagtgttgcttagctattttcataatgatttaccctttttttccccttttccagctttcgactctgtgcttaattccgtcttattacccctttctgactcttaagtgtttgtgttctttctttttttaacccatgttagaaagcctattgcatggacaaataataaaataggaggagacaactgggggccattagattagaattaacacaggctttgaggaccacagtgtgataatacataacatatcactcaattatccccactcctcacacctttccagactattcgtattctccataatgttcacttttcttttagtgatggatggttctctgcctacctccctgaaacacatcatcagcaatgcagaatactatggcccatcactcttcctcctaggtaagtggagttgatagttggttataacaatttgggataacctggcagagctctctctctctgtatttacttacttacttatttacttatttatttttgagacagagtctcactctattgcccaggctggartgtagtggcgcaatcttggctcactacaacctctgcctcccgggttaaagcgagtctcctgcctcagcctcccgagtagctgggattagaggtgcctgccaccatgcctggctaatttttgtatttttagtagacaaatatgaatagtaaaatcctgcaaggatataaaacacagagaggccgggcatggaagctcctgcctgtaatcccagcactttgggaggccgaggcgggtagatcacctgaggtaatgagtttgagaccagcctggccaacatggcaaaaccccatctctactgtctacctggacagtagacaaatgtcaatagtaaaatcctgcaaggatataaaacagagaggccgggtagatatctgtcttattggtgatgaaataaaggtcagaattcagttttaagtaaatacctattttctgggtgctgaatataccttcgataagtagtacatttgtagtaagtaacattatcatacattttgtttatctgtgctagaattcttaaaacgctaaaggaatttagtaggagacgtggaaatagggaaagtctccttgtagtagcaagcattgtgttttacagtttggggtgttggggagactagttttggctactacaacttagatacttccttgcccccttgctgaagaaatttaggatttttgtatattaaccttgtatcttttaatcttgcacagttcacttattagtacatacttgttttgttttcttagaatattctacataatcttgtcatctgcaaatgcatttttactttgtttatggtctttgtgcctttttttttgtcttatgacattagcaaagatttctgatacagtgctggatagaaataagaatgggcctctttgctttgttcctgaatttagagggaaaagcatttaatatttcaccattaagaatgaagttagcagaggttttgtgttgaaggttttgtcaattttgtcaggttgaggaagtcttcttgtggtgtagcaactctaccatgctatggaaaagctctctgctaaggttatgttcagatggcaaaattcagacaatagttctttggggtttttttgtttttttttaagatttgttttacggtggggacgtctcaaggccaggggcagggagaatgcccgtcttctgggagaaagtccagaacagagagaaagagaaaaggatrcacaggcatttttctataaatgggaagcttagaagaaggagcaattgccattgacagggatattgtttaaaagagggaggcagcaagaggatatagtgcttaggtgctgggatagtggtgaggagcaggtgagccctatgaggatgatgccagaagtgagggacacgggcaggaaatgagacttagagcactaaatcaaaggtcagtgaaggtccaacttccttccctatggttttcttaattcatccctcacatttaaattagcatagcaacctcccagttttcccataaaatacacttgtacttgagagagaacaaatttgcaaagcgaaacctaaataattagactagccattgttattttagctccccaaatgatagtacagagcctttcactccaggtggaaggagatggcccaggaaagacatcagggagttctgagaacctcttggagtattttaataatataattggcagtttgggtttatttttgttgaactattctggataccttttctttattaatgatcatgcaacaggaagtccctttaaggcacaagcactatcttgaaatgccagtaggtagtttcatgccagtctgttatcaactatcatagtaactaaactgctttgtccctcattgagggcttcttaggcctgaactgtttggttaatgtggtctgtcaggagttacaacatgtctcggtaacctctatgagttgagtctgtgttayagaattggaaatacctaaacttgtgcccgttacaccaaagattctgatgaggcccagaataggtaaaaagtgctcctttttgtggcaagacttgataaaacagctagactttctagttgaatttgaggtgccctgggcactaaatgtccatagtacataggtcagcttgtatgggtagaagggaacaggatcgctgaataaaatgtataaccctgctgagcaggagttgtaacacagaagaatcagtagcccaagaggttggaagttggagtttctagggggcaaacttatatcagggtggacattctcaacaggggggcatcattgtatgtactatcagttggtggcagaggctgggaaagacatgaaatccttaagggggaagtttaatatggaagcacccagtgaggtcacgatgtcctgcttataatttcacactcaaacccactaaatattctgactccttctccctcacgwgtccgacctctggctcttctatgccacttttagccacctgtatttcatttgtagtatcccatttaacttccccaactcccctctcttctttctcacctcctgccttacccctcatgttatctgttcgggtctgtttgtagcctatgctaaygtcatcatgcttatgattgaccacttaaccagagagtgtagcaagttgtcaatatgagtattgaaatcctccaagggagcaagatatagttgtatgagtagttgcctgggctagggtatctgttagtattgctggaggtttagtatgtaggtggcattctctgttactaatacatagatacaatctatcaggttgagtgaggggaagcaggaaatataggtagtgactggaatagtgaaattagagtgtaaatagtgaaagtggagtgtgggctgtcaaagagttgatggggcagtggagttatgatgagttatgtgggggcagttacaagggcagttaccatcttgagggtgttagcgtcaaggctgggactgtcagttgtactgaaatcatcatctaggatgctttggtatgctggatggatagaagccctaggctcgcacttgagaaattattataaaagtaactcagtatccctttgcctacaagagttttagaataatttcagatagggaagctatgcactgattacccctaaacaagtgggatcacagcatgggcaaaaaggagcccaagaagtttggcattgagctggggtagtagtatcccagacccagaccatgagccaaatgaggtatagacaggccaactagagccagaatattccacaaagatattttcaggcctgtggtgcgtagacttttggcatgccgaagtgccagtttattatgggaatcacaggcattgccatcccatatcctgcaatagtctcccattcaatacctctgtaataaggtggttccagaactggcttcctgtctaagaatgttggtactaggaactaacttaagatttttctttcctctttggaagaaccatacagttgtgtatgtcaacccaggcagagagactaagaccttcatttcctatgaagagggatctccagttagcagtcctttaaaaccatcatattaggaaaggactttggcagagaccttctgcatagtcttagagggtgagggccctcaattttctgtgggtcccatcctgttacctactttcaacctaggctcctgtccaccgtggatcgcaccaatatcaaatgaggaggtgtcgttaagtgagggggattctgtttgggtattatagactcatagatggaaagtatctcattttgaggctagaaaggggacaaaggaagcactaattgtgttttttcagatgtcatacaactaaggcaatcggcaaaagagagatcmatttaagagaccattgtccatttagtaagtttaagagagcattgaacaagccattatgcctctattaggcctgctttctgtgaacagtacaacagatgggccaggcactggctcacacctgtaatcccagcattttgggatgctgagacaggcagattgcttgagccttgagcccaggagtttgagaccagcctgggcaacatggtgaaatcctgtctctacaacaaataaaaatgtttgcagggcatgctggtgcgctactcaggaagctgaggtgggaggatcacttaagtactggaggttgaggctgtagtgagctataattgcacccctgcactctagcctggggaacagagtgagaccttgtctcaaaaaaaaaaaaaaaagacaaatggaagctccaaggtgatgccttgtttgaaaaggcccatgcccagactgaatgagcggtaacgtacgtaccctggtcagagtcggtgttaccagaagcccaaagggaactaactgagggctataatagtggtggtgttggcagtagttgggcaggaaggataagccaagaatgggtctgtataacaatcagttgtgagggcatagcgatttgtgccagcagattggggcagtggcccaataaaattgatttgccagtgagaaaaggagtgtttacctctggtatggtgagcccccactggtgatgatgccgatggcacgacagggcacaaagaacatattgggaggctagggtttgagtagggctagtggcatggggatgcaatggcatttgggcccagggactgtgatgaccttctgccttcytttactctcttctctgtaaccttgactttccaaactctgttggattcattttcagttctattgaagtacatctgtgggtaatttttaaggtgtcagacttctctttcagaagttggtggctgttttcttcattgtattctaatgctacattattgtagataaccatggtgtcacactggttcttgttcttatctgtatatagttcctgcttctgccttttttttttttttttttttcttctatttctctgattccttttaactttctcctggaaaccctaattaccttttttccatttcttagttgcttggttccacacacagctggttgctctgtgcgtgtatataccctttaattctaattcttggttatcagtgtttttgtataggggtcccagtgcatagtgtcgttgcgacttcttgataaaataacaggtttgatgtcttagtaattgcttgtagaacactaattttagtttttaaatactcaattttagtaactctatagaattcatacatttctacaaatgtaagtcaatcgaggggagtgtcataccaataggaaccccaaaaaggacttaaatttttcagaagtttatagcccatgaggaatcccaaaggccattgaaaactgttggtccccggtaactgctatatatctgccattcccctagcatttgggataaaggagagatgctgtattcaccatcttgaatagaaaatcctctggtttcttttagatcttaggcatcaccataaacaagtttgttctgtatacatggtttatgggtgttgtatgtatattcctcttcatcaggttttttaattaaagttattgtagttattgtagtcttatgagttgggaagctttgtcttaattattcctagaaggtttaataaaactattggcttggtgcctctctattacctggattttttttttttttccccttttaaaaattctggaacgggcacggtggctcacgcctataatcccagtactttgggagactgaggcgggcagatcacctgaggttaggagttcgagaccagcctggccaatctggtaaaaaccccatctctactaaaaatggaaaaatcagccaggcgtgttgggtgcctgtaatcccaactacttgggaggctgaggcagaagaattgcttgaacccaggaggtggaggctgcagtgagccgagattgcaccactgtactccagcctgggcgacagagtgagactccgtctaaaaaaaaaaaaaaaaaagaaaattcttactggtctagtctgctttgctgtcacttcctgagatttgatttttatgacattttcttattaaactatacatttcacttgttggcatatagtttgtagaatatatttttctgtatctagttaaatctcctttctcattcataacgtatattactgctcttttttctaatttatattatttcacttgttggcatacactttgtagaataaattttttttttctgtatctagttaaatctcctttctcattcctaatgtatattactgctcttgtttctaatttatattattgctctattttctataggtttataagcttttccagtgtcttcacaaagctagatattggcttcgtttatcctttttgctttcgttttcactgaattcttttttctgttaattcttcatagcttgtttggttactttttaataaatactttaatgctgtactatttcctcttgagtagagtttttcccatgttccagaagctttggtagttattactgcacattttaaaatattataatgtcaaaaactgatcagattaatattcaaggactcttgcattgntggtgatagtttaaaattgttgaataacctttgtatgaggcagtttatctattttcatcagtaaagcttgcatttgctttaacccagcaagcccacatcatagattttttttcctgttaaaagcagacaaaaacggatatatgtttaggtttatcattttcacaattgaggactggtttttatacatgtggtacatgcatttagtggaatagtaggcagccattcaaaatgaatgggtcgttgtgtcgggagaggacattatacggtatgacagttgtgggggaaaagcaaaatatataaaacagtgtaacctcatttatgtaaaaatatgcccataaaaatcctgtaagtgtagtcactagattctttatagtattgaatctctgatggagcagtattaggatctttaatttcatagtaagcacaagggtttaaattgctagacattgagtatgtatttttttttaagcttttggtgttttgttttcagtttctgtgaggaatctctcagttttccatattttctcatctttttttagctactgaagtggtgactgtgtttgtatttcaagaaccatcactgctctcctcactccaggacaatggattgacagatgtcatgctgcatgcactgcttatcaaagatgtaagtcttttctgctactctgtaaagaatgtcttagggcgtgaaaatcctatctcttctgtgtgtagtgttgaatctaattgggacctggttgtcaaaattccttctatctcagcttgatacccatggccggattttcctagcatctacactcttttagatgcattcaagctcactttgttttctctttaggttcctgctacccgtgaagtccttggctccctcccaaatgtattcagtgcactctgtttgaatgcccgaggtcttcagtcttttgttcagtgtcagccttttgaacgcctcttcaaagttcttctgtctccagattacctcccagccatgcggaggaggagaagttctgatccccttggtaagttgttaagatttattttatagtagaaaattgatttagtttgcaaggaaactcttccttgatcatctctctcatcgttttactggttaggtgtgctaagtttaatgggaattatcatcatacattctattatacttcagaaggaatacttcagcttctctgctcataatatttccatgcttctcaacagttcaccattgtactttcatggtactggtagaaaataggtattaagaagcagtggtagatttccaggttcaccatctggtctgcagcaatgagaaatatggagtcctgaggtgttcatctggtaatctagtgttctgatgtccaactctctaagataacgacacatggatattttttttttactcagtatacttgagaccagataattgagagattattagcaaaaaggtagggctccagaaagattacagttttcaaaaatgtgctttgtacttttcaaccaccactgtagcatttagacactatcattcttaactggagcagccagagggttaatggtttgtacatctttcttctctctcactctgtaatactagtttagatcttgacagcaaagattgccagagtagagtgcagcacacatagttactttaaaatagtttactaaactgattccttccttttccctagtgatttggggggataggggctgggtgtaaattcattaaagaagttgtggcattagaaaatcacaaccaaaaaaaaaaaataggaaaaaaatatcacaacagcctggcctggcacagtggcacacacctaccattttgggaggccaaggtgggcagatcacttgagctcaggagtttgagaccagcctgggcaacatggccaaaccccatctctaccaaaaaaaaaatttctccagtcacggaggcgcacacctgtagtcccagctacttggagggctgaggtgggaggatcgcttgagtccaggagatcgtgacactgcactccagtctgggtgacataaagtctttaaaggaaagaaaatcataaccaggctcagtttcttctttccactttatatgttggtacagaaaagagcccaagctctattttcttcagtctttctaattctaacagttcattttttgccttaaggggatactgcatccaacctggggagtgctgtcgatgagctcatgagacatcagcccacccttaaaacagatgcaacgactgccatcatcaaggtagaaagtgataaggatgtgaccatgagcatgagagagcagagaaggggaaggttttagaagattggcctactagaggtcattaggattcttgggctatagctgtaagagcattatgtctgcctcattgtttccatgtccttaggttggtcctttataaaaagatgttgtcattttagttcatcttagaaagaagtctctgttaaaatttttttagcctgggtgcagtggctcacgcctgtaatcctggcactttgggaggctgaggctggtggatcgcttgaggccaggagtttgagaccagcctggacaacatggtgaagccccgtttctatgaaaaatacaaaagttagccgggtttggtggcgtgtgcctgtagtcccagctactctggaggctgaggcaggagaatcacttgaactcgggaggcggaggttgtagtgagccaagatcatgccactgcaagactctgtctccaaaaaaaaaaaaagtattttagattgagaattgttttccttaaaaatttttttccatttaatgtaacctgtatataatgatttcttttatatattatatggacaagcagacatggcttagattaagtttgtaaagcatattaccctttctagtctccgtttgttgatccctgtggctgccccccacccccgccttattagctctgccagtttccttttagaattgttgttgaaattggtatataagttcctggtgcttggtgaattgggacagggagtcaggttcgtcagtcacttatacagccgtgtgacgctcaacaaattatttaagtttgcarcacttctattcccttgtttataaaatgtaattaatgaccrtattctgggaattatgtatataacatgtatacaaagtgtttgggcaaatacacaacacatagaaaacgctctaaatatgttagctgtctcctcctccccattccatgattactaataagtaatcttatttcctgtgcctttcagttacttgaagaaatctgtaatcttggaagggaccccaaatacatctgtcagaagccatcratccagaaggcagatggcactgccactgctcctcccccaaggtctaatcatgccgcagaagaagcctctagtgaggatgaggaggaagaggaagtacaggccatgcagagctttaattctacccagcaaaatgaaactgagcctaatcagcagtaagtgttkacagaacagatcatctagccatataatcgtgggcatgttatcacctctctaagtcttaatgaacactttcatctataaaaagcaagagagttgtattagatcattttaaagttctaaccggttctaagaatgtattagtttttccttttttgacccttgtgtgtcatttgtgctttggtatttaattgtattggttgccttaggaagtgatctttttttaaaaaaattaattaatttttaatttttattgatttttttgagagagagttttgctctcgttgcccatgctggagtgcaatgatgtggtctcggctcattgcaacctccacctcctgggctcaagcagttctcctgcctcagcctcccaagtagctgggattacagacacctaccaccacacttggctaatttttgtatttttagtagagatggggtttcaccatgttgaccaggctaatctcaaactcccgacgtcaggtgatctacccacctcggcttcccaaagtgttaggattacaggcgtgagctaccgcatccggccaggaagtgctcattcttaaaagctgttgatgaaattgaatcagaatttggtccatcaagttaatggactttgcacagagaccttattttccctttgttgatttgatattccacatcgactgcttgatttttttcaggcacgtgtgaaaaacaatgtacttttgaagcctgtctcctaagaagtccttaaggggtgtgtgaagatttgttgttgcttgttgtttttttatttttgttcattttgttactatctgttcgttccagattaattagtagaaggctttggaatttactatatgactgtaaatagtcaagaattgactgcttagatggaagcagggagtttgcttaaaggcttagtgattggtagggggtagtccaccaggctctttgagcagtattcacataccagggatgaactgtaactgtatacctgtaacttttagtcacctgcatgctgaaaatgggattgatctttctggacagtcctgcactccctcatataataagtggtcttttagtgtgtaggtaagtcattctgagaaaagcttgagcattttaggcacagctatgaatgcatttgagctggtcctgaatggcaccttgggacttaaaatttaaggtggagttgacaacaggagcaaaggcctagaatccgaaactggtatgtcctcttggaactctaaatagtgatgagcctgtgggtgtcaagtgttttaaggagaggcattaactactaagtatattgctttgttgaacagataccttaccctgtctgagaaggcaaacctatcttcattctagcagtatcttttgttctcttttaaatgttctttttctagaagaggaggacaccctggaaaaaagcacgacttttttttgtagacgagtcttagtgcttcctttgtcacacccttgaatgtcagtgaccctactggagtgtggggttccttttcctggctacaaataaggaaaaattttaaggtgtaggtggtggtggttttaattcaagctcatatatattcatctgcatgtgacgtccctacctggatattttccagatgccttacatctgatgtgcccagatttcaagctgacacagttaatcagcacactaccctcatttgcttaccctcctttcctttcttgggctatcatgtatcactgtgttctatccacagccatccccattcccacatcacctccttttacatccaccagatttctgtaaggctagttcaaatgtcttattcttgaaggaggtaggttggttggttggttggttggttttttacctccaaatgagaactcaatcttgtgttctcccaacagttttgttaaaattattcatacatgttaatggttttcctcactcacctataagctcctcaagagcaagacattgcctcattcaccagtgtatccctatcactttgtatatagtaggtagtcagtaggtttgtttattgaaatgaataaagagccttaaatgaaggattcctgaagtcttaaatgcttagagagctaggcctaatgagacatgaatgaaaatgaagagaaattagaaatataaacccagtagcattaatattctaccacagtgatagttatatgtaacttctaagatgcagaggactctagtagttactgtaccccagtatcagtagttttctacattctggatgctcatcactgcctcatttggataatccaggagtctcacagatgttgacacatacattttttcacttttgccatcttcagaggcctagattgggtcactaagtaaattattagggaaggaagaaaaagcaagagactgtctaaacttagcttcattttgaaaaccacaatatattaacagcaaaagttctttttatcttctatcccaggcaattgttataggggaattgtgtactttctcacaatatggtgaaagggcttagaaagatttggaatatgtgtcacccttctccccagaagtcttgcccatcccttcctccatatccatagttcttccgaatttctgtttcccatgctctcatttgttttccaatgccttatacacacataaaatgattaacttttatctttattttattttatttatttatttttttttttttgagacagagtctcactacatcacccaggctggagtgcagaggcacgagctcagctcactgcaacctccgcctcccgagttcaagcagttctcggtccttagcctcctgagtagctgggattacagacacgtgccaccatgccttgctaatttttgtatttttagtagagatggggttttgccatgttggcctcaaactcctggcctcatgtgatccacccacttcggcctcccaaagtgttgggattacaggtgtgcaccgccgcacctggccaatttatcagcagtttaaattcaggtatgatttccatacagattttacatttccagtttccctgcccaaaattgagactgttactcatcttacttctgtcatcatattattatgtctattccagaatatgtttaaataaaatgaccatataaagtcttatgtgtatattatatctgacgtatataccttcttgtatctagcttctttgtttgatgtgttttggaggttcatccatgttattgcatctgtcagcaacttgttacttttcattgctgagtagtattctgttatgtgataattgtatagtgattatccattttcctgttgatggacttgggtttctgagttttttccaggcttagacactaccctttctttttttttttttttttywttacaaaatcagcagctagtatttgcaaatggtgtttgtatttactcttgaaatacatggttttgtgctggagatttggagtaaggaaacttaggcactatagtctacgccaggtacgtggggtgcctttctacactcagactcactcaccacaagtagttctaaatacctgtcttttgccccctttcttctgccttctgaattgtttgatctcagaaaatctgatattgctggggatgaatatacttagcagttaagtaaccagggtttgtagttggtgcatcacggttcactttgtggttgattgcattagtgtgcctagcttaccacccaccactcatgagcagcttgaaagaaatggactatataaagtctttgtcatctttagaacttgaatagcaattgtctggaatttaaaggcaatgagtgcagagacgcagttgttccctgaaatgtggcccactgggagggctcctttgtcagagtcagctgtctcctcaaaagctggaggaagcacctgaccatccccccatcccaaaaaaccccatawacatcatactatgacactaaattgatatcctcctttacttttgatgggggcatgagctggggctccaccaccataaatactgaaaattgaccagagtttgggaatgtgtgtatgtttggggaaagggagagagacaggaagtttagaaggacttttcttgaaatcagttggtaagttgagtcctgttggaaagagttgatcattttgattattcctgtatggcttcttgggcctgagagccaaaagatgaggggaaggagaaaagtggttactgaacaaatttattcctgaaattatattaagaaccactattggtttgctttctctctgttcttctccccagtttccatgtagcaaatgaagggggcatataggtctcatttgattttactacttaggctctttgccattatatctggcttcttcaaagggttgggtgtctctgggcgggatccacacctgcactccttatcgatagaggtggatctatataggtaattgatataagtaacatggaatgctgcagtggttctgaggaggaacttaaagaaaggtttgtggtcttctcatggaatcatttcagtcttgccttataggtatactccctttctacaaagttcttccccacatttttcattgaggaggttcacaacatcctacccaaacctggttctgggtatttttgtcactgaagtcattcataatgcctctccactctcttttcctgttctatattctgctgccaaatgttcttgtgcctggcaaatctttgtttacattttgtcttgctcaaagatgagaactactagcttcttgccaactttcttgtcttcttcctctacctctccctctgtctctgccccatcccgctctcctgcaccctgtgcccaaatctgtttcaagggcctgtgtccaaaatactccattttctaaagtatttgttccttcctggggtttatcttagaggtatattttgattcatcacaatatactatatgtgtagttttttgcattgagctgcattttctgcagctgtggcatgttgtagccttctcatctgctgtgcaatattgaagcaactgaaaagacaaaagacctgatcagttttttgatagttcaggaactgtcatgctgcaaataccaattgttagggaagggagacctcaggtgtatgaatctttgaactaaattaaattgtatttcctactctccataactttaaacgtgatgcaaaaacatcgtatgatgtttaagtgtttctttgtctagcctctttcttcaagcaaatgttgagtcttttaattgaacttatttttagtgttctcatgtggataaatttccctaacagtagtttgccaaagataggatagcttctcttgtgatgtatactaatgttgagtttttaaaggcttggttgtcccctttatgctttcaaccttggtcaggcttggaaaggtagattcaggattgatttcagctgtttttttcctgcggtatatgagtctaaaggctcatctctaccccataagcctgggaagcaaaggctgcagtgagccatgattgtgccactgcactccagcctgggtgacagcaagaccctgtctcaaaaaaataagcaaataaataaataaatagaaaaaggcctagaattttatacagtgcctcctcctctgttctcttaatattggtattgtgaatttctgtgtaactcactmttttctcccctaacagggttgttggtacagaggaacgtattcctattcccctcatggattacatccttaatgtggtaagattcaacacagggcaaactgagtaaagatgtatatgtgcttttctggaaaatgtgtttcgttatcagagtccagtaattaccgtattcattttaattggaatccaattaagaggggaaagatgtgccacccttttgtttttgttctagactggtttgccagaaattagccaacacaagccccattattttgtattccagatttttttgttcactgttaccattctccattagaatccagacaggaatctgtaacaggttttgttttgccagtctagtacaggctgatcatcccaaatccaaaatgctccaaaatttgaacctttttgagtaccaacataacactgaagggaaatgctcactggagcattttcagcctgtactgtataatgcaaatattcaaaaataaaaatctgaaacactcatggtgcccaagcatttcgaatatgaaatatacaacctgtaatatgttttccaaatgtgtccaacatatattttcccccttttttcccattacttcctgggtatctcaccaaaaaagtgaagagtttgaattttcccagaattgtttaccaataagggagagacctcttagcatttgtttcagcctactaatcacttccaagacttccagagatagtttgtcttgtgcctgtgtgtttattgcccacattttacttttttactcttaaaaaaattctttgtttgaaacaaactcttccagagttcagtgtttcatttgcattatgcgtttcatttgcattataagcacatttgggggaaattttccatgatgtttgcctgcaggagagaggtaggcaaggagcactaaatagcaaattaagagattaaacatgattgtaccactaattcataatgtggccctgagcaagtcacttaacttctctgttatctcgaaatatctgattcttggtgtgcttgaaaatggagattgggcagaaattgtagatattctttacttcctggatgttttagaatccgtatcatacatctggtttatctgaggttttgatactctatagaaaacactaatatcatgactagaaggctaccccatccttattccaggctggccatttagttccacctgtcaggctctaacttctttaaaaaatttttattacctagatgaaatttgtggaatctattctgagcaacaatacaacagatgaccactgccaggaatttgtgaatcagaaaggactgttgcctttggttaccattttgggtcttcccaatctgcccattgactttcccacatctgctgcctgtcaggctgttgcaggtgtctgcaaatccatattggtaagaagcatctggccaaatgttttcatttctttctggaaatcaattttgcgatacttctgtatatatgtttttactatggtctcccttcaactaaaaaataatgaataaatttgtgttatgttgtataagtgaattttgtgactaatatatagtgtgccatgttatttctcattgaaaagtcaaagtattttttctttgttcatcggttgggtatgtagttctacatcattagagtttattggagggaaaagtgtatctccaagaaagcttttctagttgggttttattagtacctctcccttctttgttataggtgcattttaaacacattttatgtttatggttatgtttaaccatgtattttcctcccctttcaagcttggtagtcatgtattttaagcataattgacatgtagttcattgccgatacttaattccccccttttcaagcccgatagtcatgtattttaagcataattgacatggtagttcattgctcatattttgccaaaaatgaagcttctttattttttcatagtggtaaactacacataacatgaaatgtatcatcttaaccattttgaagtgtagagttcagtagtgttatgtgtattcatattgatgtgcagccaatctccagaactcttttcatcttgcaaaaatgaaattctgccattgaacttctcatcctcccctctccccagaccttggcaactaccattctattttttgtctctaaatttgactactctaggtaccttatataagtgggatcataaaatattttgtatgtgcgaccggcttttttcacttagcataatgccctcaaggttcaaccattatgtagcatgtgtcataatttccttcccttgtaaggcctaataatattccattgtgtgtatataccacattttgtttatccattcatctgttgattgacacttgggttgctttctccttttggctgttgtgaataataatgatgctgtgaacatggatgtacatgtaactctttgagactctacttttaattctaattttcccacatcctagccaatacttattttctgttttttgataatagccattctggtgggtaggaagtgtatctcattttgtttttcactggcatttccctaatgcatagtgataatgaacatcttttcatgtgcttgttatccatgtatatatcttctttgtagaaatgtctattcaaattcattgttcttttttaatcgtgttatttgttttgttgagttgtaagagttgtgtattcttgtacacgtattaatacctgatactaatttcttctcaggtatatgatttgcatatatttttcctgttctgtgagttgccttttcttggttgtctttggattcacaaacatttttaatcttgataaagttcagcttctctttttttgtttttgttgcctgtgtaaacacctgtgtttttggtgtcgtgtccacaaaaccattgccaaatccgatgttttgcagctttcccactgtggcttcttctaggagttttataacttagctcttatattcaggtctttaatccattttgattagattttttatatggtaaaagtctgtcctttcctattgcatggtcttggtacctttgtcaaaaatcatttgaccatatatatgtgaagatttaattctgggctctctattctattccattggtctttacgtctgtctttatgccagtatcacagttttgatcactgtaactttgtaatagaaatcaaaaagagtgagacctccaaaaatttttccccaacttgttttggctatttggggtcccttaagatttcatataaattttagaagggatttttctatttctgcaaaaccaaaacaaaaaacagcattggaattttgatagtgattgcattaaatctgtgaaactcctttgttagctgggctgcagagtgataagtaattcctgctgaatgagaaatccatttgcttacagacttggaaagatccataattgtgacgtgacttcatttagtttattttgttttactctttgaaatattgaattaaatgctcttcatcacagagaggggaaaatatcctataagatgctgtggaaggatagatagatttatttaaagccataggaaggcacatgatttctcctatctttgcatggcaagtgatggtgttttattgtcagatttttctccagacttgagaggaaatcacaagggtcgtataatccttgggttgtctgataaaaacaaattgcctacctgattcctatctcagaataatcgcttttgttttaagaagaaaagaacagtgtaatagtgactcacttccatgctttggaactttgcctaacattgtttcctatcgagcaaaatttggaattaatcctatagtgtagaatccttgccgtaacagtattcagtttgaccatcataagcttttaagtgttattggctcaccaagtttgaaagtagtgtgttgctctagaaagagatgttaaggtatgttgtacctgacttcatatttgggttccaccatttaccaggtgagagaccatggccatatccaaaatctgagaggcttccatttaattgtcacttccattgtgactattaaaagacatgatgaatttgaagttcattgtatattaacactttaattattcttcctgtttcagacactgtcacatgaacccaaagtccttcaagagggtctccttcagttggactccatcctctcctccctggagcccttacaccgccccattgaatcccctgggggctcagtgttgttgcgagaactggcttgcgcaggcaatgttgctgatgctaccctctcagcccaggccacacctctgctgcatgcactcactgctgcccatgcctacatcatgatgtttgttcatacttgcagagttggacaggtaaaaataaccttaggggtgaacatattaatttaaaggcagtgaaatatctagggcatacacctagcagggttactatgcttgaaaggaggtctgcctgaggtagcagctaaaagaacagtccaatttaggatgagatttttttgactgtcaaaaagttgagtgactatataacttattatgtgatgaagtggactttcttgagagcgaaacatgttattacagacaaacatcaattgggtattcatctggccttagtactttctaatctttccaccagtccttataggtctgataatgggatggcataggtaggacattttaccaaagaacatttaaatcaatagtaattaacaaattactaaaaattttctacatatcaaacgtttgacctgtaatccataatccatagttccagaaagaaggcattttgtgtatgtcctcacagttttactacatttattcctcagataattgattctaaagatttatggtatcaacattaaacaaaacagggttcaacagccctgttttatgctattgagcaggagtgtgttctctgttaattgtgaatcaatcaaatctgaagtttaaaaaagcacaagtataaaggatttagaaaattaaattacttaacaaagcttagggattgatttttatgacttctttattaaatgaaataaaatgaaaatgaaacattcaaggaattaaataaatctaggtacttactgaagtaaagaaattgaatggaaataataatacccctaccaaataatttagaaagtagttaatgaacctgtaaaaccatttctttgattcagaaaaaaagagtagcctctgatgcctttctttcactttataaaaaacaatgagaacggatgttgtggaaatagtttgtaaatattgtaagaggataccttgtggaactgtcgtcttgagtgtggacattttgatgaggtggataactctgagaatagcaatgaagaaaaatcccttacccttataaaactgttgaaggtcaatttttttttttaagtataattgttcagagaacatcccaaaggtgaaattcttgttatgattgcagagtgaaattcgttccatctccgtaaaccagtggggctctcaattgggtctgagtgttttgagcaagctgagccagttatactgttccctggtgtgggaaagcactgtcctcctctctctgtgtaccccaaacaggtaagagaatggctctctctcttattactttgttayctaagttcggtgagcctggaggattgctttggttggggataggagggtatggaagagagttcagaggcctccttgtccttccctcttcccagcctaggaacttgatgacaaatgctttgtcgtcatggtagatgtttaaaatgtgttcctgttattagccagatacaaaaaattgagttgtggctggacacggtggctcacgcctgtaatctcagcactttgggaggccaaggtaggcaaatcaagaggtcaggtgttcgagaccagcctggccaacatggtgaaaccccatctctactaaaaatacaaaaaattagctgggcgtaatggcgggcgcctgtaatcccagctatttgggaggctgaggcaggagaattgcttgaaccccggaggtggaggttgcagtgagcccaagatcatgccactgcactccagcccaggcgaaagagtgagactgggtctccaaaaaaaaaaaaagaaaaaaaaaagaattggaaagcttgtggggtgctacctcaggaattatagatgctttattacattcagtttaacctgcctgctataggagggatagtgtcagccaagcaaattagagaccatttacaatataagaggtgaattatcagtatatatatatatatatttcttttgctcagcatttctctttttgcagcctaccatctgggtgtgaatttggccaggcagatatgcagaaactggttccaaaggatgagaaggcaggtacgacccagggcggaaaaagatcaggtaactctaagaaactaaaatgttagtcattacttctaagttttgttcctacgtctttataggtttattatgaaaatttttagttagttctatcatccatagtctagttttcatcctctcactaatttttagtcatttcttccataaaaacatatatacataatggtaaaatttagaaaatgtagttgaaagaattacccgtatttctgccmccaaaaaaaaaaaaaaaacattttggaagtgtctgcccgtcttttttctctgaatacatttgccagtgtcttagataaaaacatttcgtagatctctttcttcacttaatgttaggtaccatataaaggtacacgaattaactattccctgttaagtttctaatatgctatttttaaaaaatgaacatttttgtatctacttttctacaaatgtaaaattgattcctagaaattactgtatcagagggtattaacaaatactttttaatgtggctactagaaaatttaaattatatatgtgtttcatgttatatttctatcgacagtgctgttttataaagaagattgcttttatattatctcatgataaaaattccaaattttggccgggctcggtggctcacgcctgtaatcctagcactttgggaggctgaggcgggtggatcacctgaggtcaggagttcagaccagcctgacgaacatggagaaaccctgtctctactgaaaacacaaaaaattagccgggcgtggtggcacatacctataatcccagctactcgggaggctgaggcaggagaatcgcttgaacctgggaggtggaggttgcagtgagccgaaatcgcgccattgcactccagcctgggcaacaagagcgaaacaccgcctcaggaaaaaaaaaaaaaaaaattccaaatttcagtaagtagaaatcatacacaattttctgactctaatgctacaaacctaaaatgaatacaagcaacttttccagaatgttttttctctggtgttcagtatcaatgaggaaataaaaaaggataaactattaagaaagcaatgaagataattctgtgtataaaaatgcatcaggccaggcacagtggctcacgtctctaatcccaacactttgggaggctgaggcaggtgaatcgtttgagcccaggagttcgagacccgcttgggcaacatgacgaaactctatctctacaaaaaaaatacaaaaattagccggccatggtggtacatgcctgtagtcccagctactagggaggctgaggtgggaggatcgcttgagcccaggaagttgaggctatggtgagccatgagtatacccctgcactcaagcctagatgacagagcgagaccctgtctccaaaaaaaaaaaaaggtatcaggcttaaaacttgtacagaaattactagaaagggaaatttctaaggaactaataaagctgacataggcttagaaccaacaaacaaggacttacatatgacagctggttattgtgagggatgggataacattaataaactataaagaaacctgacaaaatgagaatttcaaatttagtcaaaacatactaaatttaactcagggaaagaataaattgactaagaactgagaatgaaattagattcactgtcaaagaattgcctctctaacagatatattttttctagcaatttaacacatttaacaaaaacgactcagcttctccacagtttttctggaatgttaagagaacaacttggtgacttgttttataagtttgcataaagctcattcttagatctaagagcaagcatataccaaagaaaaagacacatgtcacattcatatacataattcttaaatgctaggaaataaaattgtccagtggtaatctgtgatgtctagtttgaacttaacaagctataacattctagtagggcatccacattgacagcattgggtactgtgcacactgtagtccatgtgaatggtaccccctgggttgggctgtgcctacaacagtcttccaaggtagccctgggttaatactattcatatgctgtcatttgaagatgtcagcattaggtacttagaactccagaggagcatatcagtaaaatatttgggtcgtgtttttgtttttcaaatttaggaagccatgggaattgaaagagtaacaaaaaccataggtaatcttgtcagtacttctcaaggaaccaggtaaatgttggctctacattgtcctattgctcccctcttatacatctgtagatggggaacaggatggagcagctggaagtatggatgcttctacccagggcttattagaaggcattgggctagatggtgacacattggctcccatggagacagatgaacctactgcttcagactctaagggcaaatctaaaatcacaccagcaatggctgccagaattaagcaaatcaagcctttgttatcaggtgagtcattctcctttctcctaccttttctggctttcagtcccttagtcttgaaacagattgagttggaaaggctatgttgtttcacctaaggaagtttaaaacttctgtgactcatttttaagtgtcctttgttgagtggctgctatgtgacaggctttgtactagctgctacggatacagacatgacagaatcccttcctgagagccatatctactaccctcccttctttaatttcttcctcctacttactcttcaactattgcatattgttgctgctccttccatttcactgagatgtctcagcaaggcatctacaacgtccttgtcctaagtcccttctcacttgtctgcagcatggtagttgacccaccatctccatctagaaatattcttcctttggtgcttgtgttattaagctatcttgattctcggataactatctggctcttccacctagtcttctctttttgtgttccttgaacataactggcaagagacatagtctgataggtgttttatattaaagtcactttggcagctttattgagactgtattggcagcatacaaaactgcattaatgatttgcactggtctgtttgcccttttttttcccctttaatgtaataccaatgtttgggaacctatttgtgtgttcgtaaattgtcgtcactttctggcaccttaatatagaggaaaatggagacctaacttagaggaatctggggcccttcgtaaaagcaaacagaaaatggcctttggtgtttccatttgttacctcaaattcccattgcattttacattttacttttaattagtttaattctccatttattttaatttgaaagtctaccaacattaccttcaaaggaaaattgaccaagcaagaagatgttcatatttctctctccttgctttgtcatatttctttgatcttggagcattcagaggtttctgtgtgaacccagtccatatactgtttctctttggttactggccttttgccatcctcttgtctttggactacctttaagcactttgctatctgttcacctgaaagcagtggtgagaaagtgtaaacccaatgattggattcattaggttttcaaagtctgggtatacccatatctgtagactattccctaattaggataaagaaatcttaatttggatgtaataggaagaagaaaggactgttttccttgttcctatactgtatacatttgagcttattactaaattttagcaggatatgtaacctaggctcaagtagagcctatttttacacactgagtttatatgtgcatgtatatcctgaaaagacatagatttaacccttgagcaacatgggggttgaggcaactcctccacacagtcagaaatccatgtataacgtttgactccccaaaaacttaactactaatagctatctattgaccagaagccttaccagtaacataaacagtcgatggacacacgttttgtatatgtattatatcctgtattcttaaagtaagctagataaaggaaaatgttaaaatcttmagagaaaaatatatttactattcattaagaggatcatcatagaggtcttcatctgggtggtcttcacattgagtagctgaggaggaggaaggaagtggggggatgttggtcttgctgtctctgagatagcagaggcagaacaggtcaaggaggtagaaggaaaggcaggtatgcatggtgtaactttgtggaaatacacagtactttctttctgacttggttgctttttcatttctctaaaaatgtgtctgtacaataccaatttttcttccaccgtttgctttagtttcggtgcccatatcatagtaaggtccacatcataaaaagtcaaaagtattctttagtaatcagaaccctctgccagattgtcttatgtcactttggttcctggcactgcttctacatcttcttcctcatcatctggtatcggttcagaagcactcatctctatcaagacgtcttctgttacttgctctggtgtggtgtttattagctcttgaatttcactgagatycatatcctgaaattcttcacccatgaccttttttttgctatatccacaaactcgtgatttccttgattggcgctgtcataaatcctgttaagttctgcacaatatcaggacagttttctccaacaggaatttatttcaggcttgatggctttttctgtgacaatgatggcatcttcagtggtgtaatccttccagactttcgtgatgttccctctgtcagggttctcttccacagcattaacaatcctttccttagagtactgtgtgtaatagccttaaagccccttatgactctctgatctagaggctgaattagagatgtggttttggggggcaagtagaccacttcagtgccttttgtgttgaattcatggggctctgggtcaccagaggcattgtctaatgtcaaaagaactttaaaaggcactcccttactagcaaggtacttctgacttcagagacaaaacatcaatggaaccaatccagaaaaggggtcttgttgcccaggccttcttgtacaaccaaaagaccagcagctggtagtttatctttctccttcaaggctcggaagttaggagctatataggtaagggcagtcctgattataaacccagtagcatttgcacaaaatagaggagtgagtctgtcccttcctgccttaaatccttctgctcacttctattccttactaataaacgtcctttgtggcctttttttttttttccttcaaagtagggcacttttgtctgtatgaaaaaccctttcaggcagataccctttctcaatgatgttcttagtggtgtctgggaacttatctgttgcctgttggttggttgtcaraagctgcttctcctattatcttgacattctttaagccaaatctctttctaaaattatcaaattatcctttactggctttacattctccagctttaratccttcactttccttttgctttaagttttcatatagtgagttcattattttcttgaattgcattaraatctatagatttgtctttattatggcaatcctgtacccacataaacgtgcattttcaatatgaaataaaaagatttcacaaaagtgcaaggttttcaagcctgctggtgtagctgcagcaacagcttcactaatttccttttgtttgttttacaatggtctttacactgaattcatttttcctgaagtggtgggcaatctgcaatccatatcaaataattcaactttttcttgaagtgtcatgacttttccctgcttcttgggagcacttccaacgtcactagtgacacttcatatggggtcatagagtgacccaggtttattccaggttttcagtattgcggtaaacatgaaaaacaatgcgagaaccatgagagatcactacacaatttactggagagatgaactgttcatgtagaagtgcttagcctcacacagtgttttaagcagattgtggcaacacttgagctcaccacagtatcagcaggtcgtggctacaaaattattacagagtataatatgtactaaattttatccagttactcaatactgcttatttactgcaaatggcaccgtgtataagtgtatgtgcataagtgtgataaatattaaatttttataatttgtgtatattttatggtagtaaatgataaaatagactagtatctacatatattttatgcgtttatgacatacctaactttttgttaatttttcaatattttgaggctacatgtttcatctgagagttttttcaaattgtcaccaatctccaaaattttcagtatatctattgaaaaaaaattcacacataagtaggcatctatagttgaaaacctgtgttgatcaagcgtcagctgtactttgattcagacctagcccttcttgtctctggatcatgaaataacgtttcatgaaaaaacgtgaaataacgtttatttttaaaatgctatggcaacattttcatttatgattttaaaagtatatttcattgtagaaatataaaaacacatgaaatatttaaagagaagctggaaagcactcagttttttgtgttttcttttacatatgtttatatttgtatgctgccttttccttgttgaattatatattgaaaagcatcctatgaaatggaaaatttgagatgtccataatctgcccaattccttaagaagctacttgtaaaaattttcctgcttttcctagtttattttttcctctgggactacatattttttgttgtgatcagactatgtatattgtcagtgatcttttcttatctaagtggctaatcatttttggcattttaaaagttttctgtaggcattttaagtgactttatcatccactagatatcatttaacttaaatatggtttcaatttatgttcctctagcagtatgagtgcttatttgtcttttacatttggtatctgttgagtgccacatatctgtctcctaccgtcaaaagtggcatttgttccttgtgggacttcctttttggattattgaatgtagaacaaatccaagtgttaactaggggttgtaggaggaagtggtgagtcataaaaatatgttaatggtaatatgtctgttgtaattaaaccattctgagaatactgtacagtcttattctgatttctgggtttcagcttcctccagattaggccgagcacttgctgagctatttggacttcttgttaaactttgtgtgggatctcctgtccgccagagaaggagccatcatgctgccagcaccactacagcaccgacacctgccgcgcgatcaacagcctcagctctcactaagctcttgactaaggggttatcttggcagcccccaccatatacacctactccccgattcaggtgaagttcagcttgagattcagggactagaaagttacaataaaaaatatgtaagttgttcctatactwcttaaaatggagtgtgagccactgaatttgagaatttggaggtcccttgtttactctagaaaatgaagtgtaagttacttgttttggttgtacctagtacagaacatgggtaatattttaagtatttacagtcaaactgcatttcagtggtcttatataggtagtatcccttatccaaaatgcttggggccagaaagtgttttgaattttggaattttttgggttttggaatatttgcggaatacttatcagttgagcatctctaatctgaaatgctcccatgaacatgtactttgagcgtcacgtcagcaatcagaagtttcagattttggaacattttgaattttctgatagggatactcatcctgtattctttagtaggtgggaggtgtcacttcagtgtgtaaattttactcttgccttttacatgaatttcctattgcttctgtctctgctttacagaaggttaaagttttgcctttttttccactttcaggctgacattcttcatctgttcagttggtttcacatccccaatgctgtttgatgagaggaagtatccctaccacctcatgctgcaaaaatttctctgctccggaggccacaatgctctttttgagtaaggatcaagttgcttcacagaggagcatttcttggagtttgatctttgctgtgtgccttcccagcccactgcttttaagtaccctatcttgtaacagtgggatatatagaaatagctattggttgtatccttcagtgttctgggaagtaaccatgtttgtctccatttaccttggagggtaggatttagcctcccctagagttgtgtttgtaagggtctctgctttttctcatgtggcttccagttccaagtatgggtttttaaaataggtttgtctttttctgttgtttctctgaatataatttttctgctattcttggtcagatgatttcaagatgagtttcactggtttaggtttttttgtgttttttttgttttgttttgttttttgttttttttgagatggagtctggctctgtcgcccaggctggagtgcagtggcgcaaactsaactcactgcaaggtccgcctcccgggttcatgccattctcctgtctcagcctcccgagtagctgggactacaggcgcccgccaccacgtccagctaatttttgtatatttagtagagacgrggtttcactgtgttagccaggatggtctcgatctcctgacttcgtgatccacccgcctcagcctcccaaagtgctgggattacaggcgtgagccaccgcgcccagctggtttaggtttttaagactctaaaaagtaacggaggagaggcggaacaaaagaaaaaaatagtatagctgaaaactgttggacagattagacgtaatagctctaagaagagggacgtgtagggccaatatagagattggggaccttttagatgtaaaccccccttgccagggtaaaatactaatattctgtctacttttccttatttgaatttagaactttcaactgggctctgtccatgggaggtaaagttcctgtttctgagggattggaacactcagacttgcctgatggcacaggagaattcctagatgcctggcttatgctggtggagaagatggtgaatcccaccacggtgcttgaatctccacattcgctgcctgccaaattgcctggaggtgtccagaactttccccagttcagtgcactgcgcttccttgtggtaactcagaaagtgagtattcagtattctaaaatcaaaaggaatttctcatgctaagtmgttcccactctattttgtcctgcttaatgaaataacatgcttatttaagaaccactggatccaactcccagatagggctgccttacgtaagggaatatagaycatttgagaattttccgtgataaacatttgagctgtaaatttcagattggtacttgcattaggccgttcttgcattgctataaagaaatacctgagactgggtaatttataaagaaaagatatttaagtggcccacagttctgcaagctttggaagcatggtgctagcatctgctgggcttctagggaggcctcaggaagttcacagtcatggyggaaggttaagtgggagcttgcatgtcacatggcaggagccaggaggtggagggggtggtacacactaactcactatcatgaagacaacactaaacaatgagggatccacccccatgacccaaacacctccagcattggggattacaattcagcatgagatttgggcagagcaaatattccaaactgtatcactgcttaaggttgagtaaaatgcctcttctctgtgcctccttagacctcctcatgttggccaattattttgttgctggtactagttgtggaaggactgttccataggtctttaacttaatccttctgagctttgaattgaagcaaaatgattttcacacacttttcaaattacttacaggcagcctttacttgcatcaaaaacttatggaaccggaaacccctgaaggtatatggtggacgaatggctgaatcgatgctggccattctatgccacatcctccgaggagaacctgtgattcgagagagactaagcaaggagaaggaggggtctcgaggagaagaggatacagggcaagaggaaggtggctcccgccgggaacctcaagtcaaccagcaacaactgcaacaggtagggtactggcctcacactccagggtccagactttgcacccaatggagtgtgatgcttacggattttctaagctcacataccactgagtccctggtcacattaaccaggagacagtttagatttcctccttctcttagtatttattttttttctcctgaggaaaactggagtatagtcctgatgctctgcacaggtaatactcctttcaagcatgttgatgagtattctcagtagcctcctgctgcctcagtggaggcaaactgtcctcagttactttctggttaacctgtaaagagaatggatattgtgaaccagatttattctccaacaagagctttctgaaaccttagtmacctacaaaacttttgttttcacttgcaaataaaatgtataaggggcattttaaaaattgggaggccagaaagaggagaggggaaaggcatgtaaagtcctgccacttccatctcaaagagcattttaagattttcttcctggagtttgtatgtatgtgtgtcagcttttatgtctggagtcctgttcaaatctgtctactatatacacttgtcccgttttttatcattaaagtaataaatactctcattaccaaatttggaaaatacaagacttttaaaaggcattcgtaattttatcacacaagatagtcattgtctcctttttcagtcagtcttgtgcctaatttttacgtcgttaacatcaaataatacatatacttgtattgctgttatcaagaacttttttttactaattggtcattcttttattgttggatgctaattttcttacagtttgatgttttaacactgtgttgtatagtttccttacgtaccaatccttacatacatctcatgattattgcctggtagtagattaactaggtcagtttttcaggcacttgctctgttaccagtttgttttccagaaagttgggaccaatttatacttctttgtatgagtctcaatcttttaattataataaccctgttaatcataataaccatgcatccccccctaactttcttagaggatgaaatcgagaatcttcttggctccttacccaatgtgtagcttagaatgctatagaagcaccaaacagaaaggattgttcattttacctaattgccctagctcataaatgctctcagcccagatgaagttagaaaaagttatttccatcttgaaaaggttccttccttttaaaaatgtatttggatttccgttatgtgattctgagcccttgcattctttatgtagctcatggacatgggcttcacaagggaacatgcaatggaggcactgttgaacaccagcaccatggagcaggccacagagtaccttttaacccaccctcctccaatcatgggaggagttgttcgggtaagttggctcagaagcagtgattttccaggatattggtttgactgctgaagtcctttttccccttattattctgtcattggtcttcctttctataaactgcttctcattttcagacatgtccatgccagtattttcttttcataataacagaagttttctgtcccccagcaatacaaattactatactttgtttgcacaagaacccccagtcacaaaacaatagaagaggcacacttttctaagatgtagaatagatgatcacactgtaagcctccttcctatacttagttttacgtgtgattttcctcatctgttcttgtttgtagtaaccacataagcctgatagggtttgacttatacaagagcagcattttgaggcccttcctctctctttagcttgagcacaagatgtctgattgcctgtgagttgcagtggtcttgttgggtttctttgttttgagtgtgtrtccttactggatattctcttaacactctaggatctcagcatgtctgaagaggaccagatgatgagagcaattgctatgtctctgggacaggatattccaatggatcaaagggcagagtcacctgaggtaactatggaacactgcatcctaaagggcttggcacatgaatcttagtattctgtgaacattctgctagtattgcaaactaattgatagaattcaaatctaaaggaagacatgagaagagtactaattcatcccagctttgccatccattattgagctaccttgtattgacctgaagctttaagggaggcatatgaagcgttaatctttattgtcaaataagagacccaatgtgtactcagtagtgccattaggccgaacttggctgtatatttctaggtgacagttactttaattttccctgctggcacagaatatagaacagtgtctagaaatgattttgcgggaggtagtatagaatgctacaagtgacttgacagtgaaagttgtttgaagcatccctcccttctaccttccctgtcttgccttaaactttgtggctgccacatcctggatgaaagtatcaaccgcttgaggagaaggttgagggtaatcatatggtagagcaaaaacattctcagagtctctcttatctttcctccttcacctctcctgtgtattattcacacttccttccctgcttccaggaagttgcttgccggaaggaggaagaggaacggaaagctcgggaaaagcaggaggaggaagaggctaaatgtctagagaagttccaggatgctgacccgttggaacaagatgagctccacactttcacagatactatgttgccaggctgcttccaccttcttgatgagctgccagacacagtataccgtgtgtgtgacctgatcatgacagcaatcaaacgtaatggagcagattatcgtgacatgattctgaagcaagtagtcaatcaggtgagctctcaaggggtcagaagaggggagtatgtgaagtggtttgcctgcctgtgtcaaaacctgatttctgaaaaatcagcatattttcattctacctgatatgggtatattctctatttggattctttcgatctggtaatcctgaaacagtgtgttaactacatcgcacacacaaaaatgtctttagaagggaaaaacaaagctctccttttctacttttctcttaaaatgtctaaaatgtgcctcacccttgagtcaggttcgtcccctggactaatamtgaataaatgttttttcctatgtaacagccgcttgaacaactgagtccccatcctgatgaatacttgtgacctgatatttgtcctctttttcttttctctcattatgaaattatgctaattatagaagtgggataagaaaggaattaccttaaatccccacacccagatagccagttaacatttcgattgtatttaagttactggaatcttgttttatgtaatgtttcattctagaagcagggaaagaaattaaaaaagggaaaacttttttctgggctttgtaaaatagaactttaatgcacaagaacacaagtaaaggaaaactggataaaacattttttcacagaaagttttagtgtctattttttaacaataattctgagagagagagataaaatgaaagattgctgatggaagtataagttgatagaacctttttggggttgactgtatgcaccaggaagttttaaaatactcatttcctttaacttagattttargctgcttatagtctagcctaataaagtaattgtttagtggtgatcctttagtagcatacatcttttgatatagattctaaatccctatggtaaatatgttagatttacctacctttctttagtgaatgtgttggaggcagagggagtattttaaaaggttgagaatattttcagaaacctcatcttgctctgcggttccgtgacttaaccctttttttgcttttctaggtgtgggaagctgctgatgtattgatcaaagctgctcttcccctgacaacaagtgacacaaaaaccgtgtcagagtggataagtcagatggccacactgccccaggcctccaatttggctactagaatcttgcttttaacgctactttttgaggtaagatttagatctttggggccttgtaattcattcatgaaagaattatcaaacacttaacatatatgaggcattgaagacgataaagcgaagaataaggcatgagtcctgcatttcatgagcccagtttctgataggctgaaatgcatataattacgtataaaatacagcattctgtgttagaatgataacagttttatctgggtttaggaaagtcatatgcatcactttggattcatgtgagaagggcttctgagaacaagcattaattgaattgagtcagaattgtgaggtggtagtttaaaaaaaaagtatttaaattactaacagagcttggtcatagaatattttttgctcttctgaggaaacctaactggcagccacatagtagagtagggtatgcaaattggatgtggtcaatattgaggtaatagacattagatgaaatcagattcctctctcttttccttgcctatttagtcagcagattatttgaggcaagagagtggtttgggcaagacctgatccaaccaacgtaggaactaggaggcaattgaccttggacaaatgacttcatttgtggctcattatctttaaaacctgaacttaatgaactgaaccctttacatacagcaaactcaggggataaatccaatataagagtcaaactgtgtaacagctgtcttgggggtttcctttatcatggaagtgataactcttactgtagcactttgtaaatagatacttgtgggaaaggtttcagagtactaaagagagaatcattcatggacccccatctaaaacaaatcacaagtaacagtcttgtattttcttttagtgttttttcctgttcatttaagcaattgggataagactgtatagaaagttttatattctttttgttaagtattatgactattttcccatttgctatatacattagtccatcttttgaatgttctctaatttatttaaataattacctatccttggacatttacttccagtgatttcctgttaaaagtaacactttggtgtagccccagtaagacgaaccattaactgtgtttaattattccattttccttgaaagattataaaatttctctgtaaatctaaagctttacaacttcaacatagactgcacaaccttggtgataaaccatttccatattaagcatatacattagtgccaggcactgggtactttatattaatatatataaaacctcaatcatcacaattattctgcaggtaaaaattatttcctctgacccatgaggaaaccaaagcctagaaaatttaacacatcttagattacacaactggtaaatggtaagaggtaaaatttgaactcaaccaattctattattatttacccttatgttcccctcccctatcccatgctaatctttgttactgagtagaaattggtatctggttgttgttgttttttccctttgatctatcaggagttgaagctaccttgtgcttgggtggttgaatcaagtggcatccttaatgtcctaatcaaactcttggaagtggttcagccctgcctccaggcagccaaggagcagaaggaagtccagaccccaaagtgagtaaccctatatctaccctagtttcgtttctatttccctgggacatgggcctgaatcaggcactcttctggggcatgtatggggcaaatttgtggtacttctgtagttttaaaattataaaggaagcatctgatgaaattaagatatattttcccaatttgtgcaggtttcttgctttcccaaaacagatcatttttcttttttaggtggatcacaccagtgttgctcctgattgatttctatgaaaagacagccatctcctcaaaaaggagagcccagatgactaaggtgtgtaatgtagtatgtatgactgcaggacggtttagcttcctgaggcaagagtagmccagaagagaatatgagagagtagtgaagaatatagaagtctctgaccaatgtataaatctcttaagggattttcatagctaggtttctcttctgaataatttactctggaagtaaattttgaaggagtgtgctatctccagaggaggagcggcttttctgttatgtaagggactgagtatacagcaatcctaccaaaaagcaaacactccttagatgaagattattgtgccacatcatctcactaccttcttggaaacagaatttttgtttcagtacatctcaggtgaacattccccttttagggaaaatcagtagaaacaaaaggaaagtagaaaatggcaagataaggggctgtagatagtttttttgtctaggaaaagtatcttagtccgttttgctgttgctataacgtaataccacggactaatttataaaccataggctgggcactgtaggctcacgtctgtaatcccagcactttgggaggctgagacaggtagattacttgagttcaggagttcaagaccagcttgggcaacacatggtgaaaccccatctctccaaaaaatacaaaaattaaccaggcatagtggtgtgtgcctatggtcccagctactcaggtggctgaggtggggagatcacttgagcctgggaggcagaggttgcagtgaaccgagccggcatcgcgtcactgcactccagcctaggtgacagagtcagaccctgtctccaaaaaaaatatttaatataaactgtacaagtttatttggctcatagttctagaggctgatctaagggaccacatctggtgacagccttagtgctgcatccttctattgcagaaggtggaagagcaagaggtgtccaaactcgcttttataaccaacccagtcacaataactaacccagtccgtggataatgacattaatccattcatgaggggcggagtccccatgacctaatattatcttttattaggccccacctcccagcactgttaaattagggattaagttttcaacacctgaactttagaagacatgtttttaagcgtgtagcagagagactaaggaatgtgagagtaaatgcatatgaaaaatgttcttttggtttttaaaatttattgtccagtatatttctttttcctgggtgagttttagcagtgaacactgatgaagttactatttcttctaatcaaccttgaaagaaatacaaagaaactttgtacttttatgtttagtacctgcaatccaacagcaacaactggcgctggtttgatgatcgctctgggcgttggtgtagttacagtgcaagcaacaatagcactattgattctgcctggaaatctggagagacaagcgtgcgattcactgcaggccgaagaagatacacggtccaattcactacaatggtgcaggtacatgctcactcaccaagcttgtctaacccgtggaccacaggccacatatggctcaggatgtctttgaatgcagcccaacaccacacattgaggtttttttgtcgttgttctttttagcttatcaaatatcgttagtgtagtttatgtgtggcccaagacaattcttcttccagtgtggtccagggaagccaaaagattggacacccctactgtaaactttatcaaaaagaggggtatgtgttttggttttcttctttctgaaccagcattcctaacgtgttaggaggaggagagttaccattacctaattaagtatagatttcagaaaatcgagtcttcctaaggtcattgattagaccttgggtctgtagcaatttgatactatccctcttagaaatgattttaagtgtttagtcaagggctagggagtggttagggatggtatttgctctgttggaaggtctacagttcattataaggccttgtgtatgccacttgccttctggggactttcaggttttttctctgtaaatgataaaggtgggataaattgccagagttccttcctgttgtagcattttacctgggagatgtccctcccctcccccacctttataattcatttttggtagaggtttttttaatgtctgtttgaattcctaggttaatgaggaaacagggaaccgacgccctgtgatgctgactctcctcagggtacctcggctgaataaaaattcaaaaaacagcaatggacaggaactagagaagacgctggaagaaagcaaagaaatggatatcaaacgtaaagaaaataaaggcaatggtatgtaccaagagtgttttacctaaagctaatgtgcctttgtggcttaaggtctggccaatttcattgtgagttattttcatcagcttgattaacagattaaagatacgtaggcctcccttatgctttttcatctgatcttaaaattggtatttggcatgcttctcttaataggacccaagtgcttggccaattacttaggagggaggcgtgggaggaaataaacatcaagttaaactgtctaaaactgttattttcccattttatagatacccctttggccctagagagtacaaacactgaaaaggagacaagcctggaggaaacaaaaatcggggagatcctgatccagggcttgacagaagatatggtgactgttttaatccgggcctgcgtgagcatgctgggagtccctgtggacccagatactttgcatgccacccttcgtctctgtctgaggctcacccgggaccacaaatatgccatgatgtttgcagaactgaagagtacccgcatgatcttgaatttgacccagagctcaggcttcaatgggtttactcccctggtcacccttctcttaagacacatcattgaggacccctgtacccttcgtcataccatggaaaaggtgagtgtgttttgtatcagattctggtttagctttacatcatacctatgttctccttggtctgagaacaaatagacttctggttcttcttagggtatatagctagatatgtatactgtatactccacccaacagaattttccaactctatgcttgggagcttgcttaggtatggtaggatgatcctattgctagaaagtcctctccagcaatctggttttcttttttttctttttttctttttttttttttaatctaggtttcattaaccaagccaaaaaccgttagtaaagaactgggataccttcccccaagttcataccttcagaatcattcctttgtaggagtacctctcgggtgttcagccaagagactattctcaaaacactgtattttggaatataaaagtatagttaaagctttttgaatgtttgtaatctgccaggcactgtgatagacacttaacaaatatccattgtgcagatcagaaaacaggttattatattttaggaaacttacaaaccagtggaagaaatagcaacgtacttataaaaaataaaaacatttgtaaagttaagacaatagtctgggtgtggtggctcatgcctctaatcccagcactttgggaggcaggtaaatcacctgaggttagaagttcaagactaggtgggtgtggtggcatgcacctgtaatcccagctacttgggaggcagaggttgcagtgagccgagatggtgccattgctccccagcctgggtgacagagcgagactctgtctcaaaagaaaaaaaaaaagaagacaacagtggagggttgaggggcaaatgtcctagtagtgaggcttttcctcctcagtacttaatacaaaatcctttcttctgctgattctttgtcatcaataatgactgttaatagactttgcttccgttttcctctcttgggacattgtttcccacatttataagcagtgttgcaatatgcgtttttgtgcctaactttgttcatgtttaagatcgttacttagagatttttagtaattggatcaaaaggcattacaagtattttttaacttgcttgccagaaaagtggtatcagtttttgtatatctgagtatacattttagattcttcagacagttctttacacagcctgcttgatttcacctcacatgtgccaaatcaagagaaagagagctgttaaaggtagcttgtatggtgatccacagtccaggagataacccagcagggaaggaacaactatatacaactaaattctgattttagaaacttgaaatgcttgaaacgctttctataaagaaatgtttaaaagttacaagttcaaagtgctaggagaaagtgtaggtcctcattggatgagggaaaacttttaaagttttaactttaggtaaattatagttggggtgtgggaaacaaaggaacatcagtgacagtcttaacgtatcaagatggcaaaatgtaaagtcttggtactattcattgctagtacaggtgtggaaaaccaggcatactcttaactttcggtaggagtggaaattggtgtagccacatgggagggcaatttggtactcttggtctaagatatcctttgacctagaaattctatggctaagaatttatctgataactaacatcaagtataccaagatgcatatataagagtgttcactgtggaattgcttgtaatatcaagaaactagaggtctaatgtccagcagttgggggctggataaattatggcttatccttaatattgaaattaaacttttctgtgtttattaaatggaaattattttataattacagccagacaggcaagatacagagggtataatgtgctaaagggcatgattgatttggtttaaaaaaaaaaaattaagataccaaaagatgtttttcattgtgagcatgtagtttgtgaaataacagataatggaaaataatacaattgagttattttcttcgtgctttcatggatttttccattattaacaagcaattttatgagaagagcagaagcatagctatatgtaagccctgtgttatcaaggcaaacaatatataaatagttcagtatctccagtggctatcattatctcagactgatggttgactttgaggcataaagaaaatatttaattgtgttcctgtacactaagtggattacagtgttacatgtttttgaaccattctggtttaaaattgtgacagcatttggagaggctcaggagctgacattttaatgtggaagttatgtggggtttatagtcttgacacatctcccagtttctataaagatcacatgcagtctggtctaataattgatagttttgagacatgctgcaacttttttataagccaggttttttgaatcaagaagggatgggacgggacttaaaaataaaatgtcattctccccaaaatcaaaagcttttagtcttggtaactcttgactgcagttgtatttttagaaagtagtgtttaatcgacagtgtttctttctctctttactaggttgttcgctcagcagctacaagtggagctggtagcactacctctggtgttgtgtctggcagcctcggctctcgggagatcaactacatccttcgtgtccttgggccagccgcatgccgcaatccagacatattcacagaagtggccaactgctgtatccgcatcgcccttcctgcccctcgaggctcaggaactggtaartttcgcttgctcctggcctttgatattaagtktgtggcctggtrtaaatccagaaatttatttatgaggaggtctgtaacttgaagagcctccttaggcaagtattaggacatttgctggctaattgatygtttgggtcaatttattaggtacttcagtagcttctctgggccttgccctgttgtaatccctgccagagacactgaggactcattcattctagtccttcacttcaaagagctcattttggtggggcagtaggctttacatatagttaatggtttacaaatcaagtgataattaagggttaaatggatgtatgtctcgtgtaacacagtgcgaaatagacgtcatctgtgtattcctgccaagaaatgtttgacctgtatttaattatgaggaaacaattagataaatacaaattgtgagwtgttctatataagacaactggcctagactcttcaaaaatattaatgttatgaaagaaaaaatacaggatcatttcttatagagaaaagtagactagagagataatcaccaccagccttggttgggctgtggatccagataaaagatttggagaaatttgagtgctatgtattaggtaatgtaattgtatctgttaaatttggggggtattataatggtattgcagttctgtataaaaatacccttgatctcccctctgctgacttttttggtaataaaaaagaaaatatatgtccttgatcttaggagctacaagtagatgtatttaggagtagtcacttggtaattctggatgaaaagtatatagatgtttattatactattcgaacttttctgtaggtttgttggatttgtttttttattttattttwtttttttaattttttttttttattgatcattcttgggtgtttctcgcagagggggatttggcagggtcataggacaatagtggagggaaggtcagcagataaacaagtgaacaaaggtctctggttttcctaggcagaggaccctgcggccttccgcagtgtttgtgtccctgggtacttgagattagggagtggtgatgactcttaacgagcatgctgccttcaagcatctgtttaacaaagcacatcttgcaccgcccttaatccatttaaccctgagtggacacagcacatgtttcagagagcacagggttggggataaggtcacagatcaacaggatcccaaggcagaagaatttttcttagtacagaacaaaatgaaaagtctcccatgtctacttccatccacacagacccggcaaccatccgatttctcaatttcttccccacccttcccgcctttctattccacaaaaccgccattgtcatcatggcccatccccaatgagccactgggcacacctcccagacggggtcgtggccgggcagaggggctccccacttcccagtaggggcggccgggcagaagtgcccctcacctcccggatggggcggctggccgggcggggggctgacccccccaccaccctcccggacggggcggctggccaggcagaggggctcctcacttcccagtaggggcggccgggcagaggcgcccctcacctcctggatagggcggctggccgggcgggggctgaccccccccacctccctcccggacggggcggctggccgggcagaggggtcctcacttcccagtaggggcggccgggcagaggcgcccctcacctcccagacggggcggctggccgggcggagggctgacccccccacctccctcccggacggggcggctggccgacccccccccccgcctccctcccggacggggcggctggccgggcagaggggctcctcacttcccagtaggggcggccgggcagaggcgcccctcacctcccggacggggcggctggccaggcggggggctgatccccccacctccctcccggacggggcggctggccgggcggggggctgaccccccacctccctcccggactgggcggctggccgggcggggggctgacccccccccacctccctcccagacggggcggctggccgggcagaggggtcctcacttcccagtaggggcggccgggcagaggcgcccctcacctcccggacggggcggctggccaggcggggggctgatccccccacctccctcccggatggggcggctggccgggcggggggctgactcccccacctccctcccggacggggcggctggccgggcagggggctgaccccccctcccccctcccggacggggcggctggccgggcggggggctgaccccccacctccctcccggactgggcggctggccgggccgggggctgacccccccacctccctcctggacggggcgactggccgggcagaggggctcctcacttcccagtaggggcggccgggcagaggagcccctcacctcccggacggggcggctggccgggcggggggctgacccccccccacctccctcccagacggggtggctgccgggcggagacgctcctcacttcccagacggggtggctgccggacggaggggctcctcacttctcagacggggcggcggccgggcagagacgctcctcacctcccagacagggttgcggcccagcagaggcgctcctcacatcccagacagggcggcggggcagaggtgctccccacatctcagacgatgggcggccgggcagagatgctcctcacttcctagatgggatggcggcggggaagaggcgctcctcccttcctagatgggatggcggccgggcagagacgctcctcactttccagactgggcagccaggcagaggggctcctcacatcccagacgatgggcggccaggcagagacgctcctcacttcccagacggggtggcggccgggcagaggctgcaatctcggcactttgggaggccaaggcaggcggctgggaggtggaggttgtagcgagccgagatcacgccactgcactccagcctgggcaccattgagcactgagtgaacgagactccgtctgcaatcccggcgcctcgggaggccgaggctggcggatcactcgcggttaggagctggagaccagcccggccaacacagcaaaaccccgtctccaccaaaaaaaaaaaacgaaaaccagtcaggcgtggcggcgcgcgcctgcaatcgcaggcactcggcaggctgaggcaggagaatcaggcagggaggttgcagtgagccgagatggcagcagtaccgtccagctttggctcggcatcagagggagaccatggaaggagaccgtggggagagggagggagagggagagggagagggagaggagggagaggagggagagggagtttttttttttttttttttaataaaacgttgggaaggggatgaaattattttggaagttccagctatgtgcctgcccctgtgctgggcatttctcagttatatcctcatttaatcctcaacataaatttggagagtgagaaaattgaggtttgttgaattaacaactggatttcaaaaccagttttctctaactcaagcctttactatttggtactgctatattaaatcctgtggaatttaaggaaagtataaaccaggttttatagtagagtacttgaacattaattgaaaatggtctcctatctcaagccttctatatcatacatgcccccttctgagtctttattagtaacctagtttaggtactgcttcatgattgactggtttttctctctcattttggcttagcttcagatgatgaatttgagaatcttagaattaaaggccctaatgctgtacagctggtgaagaccacccctttgaagccctcacctctgcctgtcatccctgatactatcaaggaagtgatctatgatatgctgaatgctctggctgcataccatgctccagaggaaggtatgtggctagcctacctcaggaggctgggcactagaggatatgttactttgcctgggtcatttcagccaactcatggcttagtgagcactcactatgtgcccatactctggggctcaagatgaataagatacccattgcatgtctgtgaagaagctaatagtcatatagtatgacataccaggatggtggtaagtccttagggtgaggcaccttacctagtgagggtgcacaggtaagaaaatttctttgtgtacatgatttctaaaatgaaccttgaatggatgagattgccagagttctgttatatgagaatacacaccatacgggggaagaatgaacaaagatttagaaggagataatagcattctgtgagaggttgaaaataagacaccaggaagtctctaatgttttcatactcaagcaaaacctttttattgtctgaagagctggaggcaatattaggaggtgtgtctgagtttcctaactgttgagaccaccacacccatccacctttattcctagttaaggtgcatcttataagcattaggaaagtcatgattgatttgcttggaacataggtttccattatagtaaggtccttctggattttattcaggacatacttatttgataggtccacagaattgccaaaaattgatgaatgctgcctttaataagcaaaagaaatctgagtcttgaccttggtgcttttcatctgtacagaaccctgatccatatagaattccttggttctcctatcaccccagaatctttaccctatctcttatcacctccccgaaatagtttagctatatagctgtggcaaccatttattgacccaccactgcatgagcaatagtgccaggtatgttcacttaaggtttgtagttacagcttaggaaagtgagactaagttaattgcctgtggtcacaagactagtttttgtaattttagggtgaggcactctaacattatctgtaatagcaccatgtaaacagtcatagccacttgatgtgaaattgaccaagactgactagataggccttaacattgtccaattgtagaagaggtttattttgtttttgatggttgttactgttttcctagcagataaatctgatcctaaacctggggttatgacccaagaggttggccagctcctgcaagacatgggtgatgatgtataccagcagtaccggtcacttacgcgtcagagcagtgactttgatacgcagtcaggtttttccattaatgtaagtcaattccaacagcgttttatctttcttctcatttttcaatgcctgtgtggtctcagtatttagggctatccccggggaatttcaaagatattaattgtgatgtatctgtaaattatctgttgcctgtaaagacaaaattggggtgtccctggagmcttttttttctctcctaggattagaactgttctttaattttttttcttttccctttccttccccgcctcccccacagtctcccagtcactgtatttataatagcctcccacagattatagtataaaggtgtaaggtggttaaaaggttggccaaagagaatctgtggcattcccagccagtgccctgggaaggagttctgccatttgcagacgggtgcttttgaaattcataatagctcaggagttttcttcttctwcagagtcaggtctttgctgcagatggtgcctccactgagacttccgcatctgggacctcccaaggagagggtaatgatttgcttttctcactaccatgttcttattccttaggaaaacaacttgaaaaaactgtaggtgtcctgtgcagggggtaggagaatacagacttaattattacgtttactggtctaagkgaactttctcaggtgagctcagtgttctgtaataaagggtctctatatgctaaagttaatggaactgtaagttaaccaacctagtaatggttgctgtggtaacatattttagttttactttttaaatcacaccataattatttggggggtttctaaaaactggcttatagagattttatgccagtgatattgttctagctacatgctttacgtggtggatgcctgtcttccagcaatgttaacagagcccattgactactcaccatgaactagaaaaatgtccctgggagtaagtctaatgagacctttaaagagctgcttctccttagataggaaaggtctttgtgatccaatttaggagacattttgtttaaaatcatactagttcctggagataaatttaaaaggctaacattagtgaaataattggttaactcattttactgggtttactggccatatgtagtgtatagcgtggatgatggtgctgattcaagggaagcattacccactatgtggcagactatattggacaccaaaatggatcagatttgttccctgtacttaaagtactttgtccagtgactgagacctgcaagagttataatgcaggataactgccagaatgaaggcatacttggataagatataatggacatgtaaagtatctcacagtatgtctagatgagacaggaaagcatttatggaggaggtcagcatttgagctgaactagataaaagtgtgccaggcagacggaagaaagaagtaagggagcaagacaagtttgaagaactgttagtagagtgtttctggagtatgtaaaaggagagaaatggagggagatgcacaaaaagttggccaaagcatccctgttgtactgaaaccacataaatctgagacctgagttatcctgggtctctgctcttgtctgcagtgcacgagagcattcagtttgccaggtggcttaaagtggaggagaaatagcattcttttccacctaagccttgattttgccagtgttccagtgtggaattgaaccagtgtttgacttttcgcccagcttcaactccagaggagtctcgagatgggaagaaagataaagaaggggaccgggcctctgaggaaggcaaacagaaaggcaagggcagcaaacctttaatgcctacctccactatccttcgtcttctggcagagttggtgaggtcctatgttggtattgctaccctgattgccaactacagctacactgtgggccagtctgaactgatcaaagaggtaatatttccaacttctatttaagatgttacactgtacttccatcatttgggtaccgcctgtgtcagacactgctgggaagctgtgcatgctaagtgctaacccaagtaatgagtgagaagaggcatcttcagacatgcaaggccgggtgcggtggctcacgcctgtaatcccagcactttgggaggctgaagcaggcggatcacctgaggttaggagttcgagatcagcctggccaacatggcaaaaccccatctctactcaaaatacaaaaagaaattagccaggcgtggtggcgggcacctgtaattccagctattcgggaggctgaggcaagggaatcacttgaacccaggaggcagagattgcgggaatcacttgaacccaggaggcagagattgcgggaatcacttgaacccaggaggcaaagattgcagtgagccaagatcgcaccatcgtacacctgcctgggtgataagagcaaaactctgtctcaaaaaaaacctgaaagagctaggccttttttcattaggttcactgagagagagagttaatgagatttgttctattgaaagtccctttttatgcattgtggagattgaagagggaagactggagtcagagagaacagttaggaatctgatagagtaatctagtaacgtacgatcttggtgaagttggaggaaaatgggtgagttgaagaaatatttttaaggtacaaatggacaagaattgggtttggaagatgaaaaaggaaattaagactcaaggatgtttcttgatttgtgggggtttttttaattgcttttatgggttggcatctaacaagaaaatagaatggggtggggaaggtttgaagagaaaatgaggagttttgagaagtatctgtgggacatctaagtaaaagtgtctaaaggacagttgaataaaccatataaataagaatataggtgttcatcttccagatgtactcacacatgtgcaaagacaccagatgtggtagcagtattggtaataaaaataaaggaaaagccttaaatgttcattagtagagctgtggaaaagaatgaagtgtcctgatgcagaattatcctcaggttagattttttaagtgagtggggcattttgagaaactgtatcacatgttcccgcatatgtaaaatgggtgcccaaatattttttcccgtaagggtgccttgttttgtggatcacattgtaattttatggttagtaagtggcaaaagggtctgagagtgagtaggggcactagtgttgccatctttgaaagcaaccgccatttttaaagctattcttactttaatccaagtttaatatacatagaaaaatacacaaatcttaaatagtctgtttttcctaggtaaccactagccaagttaaataaagcattacaagctccctagaagctgccctccttgttctttagtgcatctcctcccacccatttcaccttcactcaagataaccattatcttgagttctcgtgccgtaatttggttttgtagttcatgtaaatggaatctcatagaatgtactctcttttttgcctggcttcttttgcttaacatacttgattcaytttgtgtgcaggtgaagtttattttcatctgtataaaattccactgtggaatgtaccatgtaccaaaacaaatacatcttttacccattctactgctaataaacatttgggtaattttgcctttggagctatcacagatagtgctgctatgagcattcttatgaatatatataagttcgtgaactacccaatttctgttgggtagtatatgcctaagagtaagaattgctgagctctagagtatgatagttgttctgctaatgctaaaagttttccagagtggccaggtcagtttatattattaccagcagcatatgggagatcaacagttggtgttttttcattttactgattttaatgggtttgtagtggtattgcattatagttaaaatttacatttccctgttgaccatttttttcatgtctttattggccatttgttcattctcttttgggaaatgtctattcagctcttttactctattttcctattgagtttttaaaatatattctggacataagtcctataaatacataaataggcttcctttttttaagagtctcactttgtctcccaggctagaatgcagtggtacaatcatagctcactgcagctttgaactcccaggctcaagtgatcctcccaccttagcctctcaagtagctgggacctataggcacatgctaccacgcccagctaattttattttttgaggtcttgctatattgcccaggctggtctcaaacttctggcctcaagtgatcctcccgcctcagcctcccaaaatgctaggattacaggcatgagccatcacacctagccaggctttattccaaagctttaactcatttatgccagttgtattcataatttataatagtattacctgtgggttaacatatttaattacaaatttattaagtatctgcctaatatgtgtccagtgtcctaccagtactgggtactggtaagtgctttataaatactattgttaatcctcacctccacactgcaaggttgttgatagtgatctctttaatagaggagagaaggctcaaagaggtaagtaacttgcctgggaccatactacagagtagcagagctaaaattggaagctagggctatgattccaaagctaagtcctttctacgtggttattgagaaaatagttttaactttgtatgtattcactactgggaaattaattgttatttctaattgttttgttttgacaaggtcactttattcagtttctcagactctcaaattattcaatgcattttctttattgaggtaaaatttatataaagtcaaccattttaaagtgtactgttgagtggcatttagtacattcgcagtgttgtgcaactgtcacctatgtagttccaaaaatgttcagtgtattttcatccaaaatttgcttgaatgacaatagaatttgtttctaagataaggaattgtctaggcaggaattgtagttagagaaaaaagaagagtctgacttaatttccttcctctattgagcctttttcgttactttaaataaccttgcattaaatatttttgcatattagtttctgtgactctgctgtctcttgctcagctcttaccagcttctattgtagcacagggtcctgggcacattgtaggtgtcagtaaataatttcaatttaattgaacactgaagggtttatagcacttaattaagaatcaaggtttgaatcctcagcccttgattaaattcttctgtgcaagccacttctttagggggcttcagattaccgcttatcaaatgagaaaatacttatctatttatagatttgctgtaagtagttctattaaatatcacatgtgaaaatattttaagataggtgcaatagcacatgcctgtagtctcagctacttggaaggctgaggtgtgagaacacacacacaggagtttgagactgtggtgtgcgatgatcatgcctgtgaatagccactgtactctggcctgggcaatatagcaagacctcatcttcttaaaaacattttaataaaaataaagtttttaaaaaatgtttttaaaaatacatgacatctacataacagtgtataagctgtgcagtgggaaatgggtggcatttggaagttttctaaaatctgggtttgctccttacttgcttgtatctttgagccttggcttcttcatctataaagtggacctaataatcactcattgggtgacttaaggaaatactatgtgtgtgtgtatctttggtcctgtgcaaatgatayggcataattgtgcttgtaagtaaatgtcgtgattcatgacttttcaggactgcagtgtgctagcttttgttctggaccacctgctcccacatacccagaatgcagaagacaaggacacccctgccttggcccgcctgttcctcgcaagcctggctgctgcagggagtggcacagatgcccaggtggccctagtgaatgaagtaaaagcagcccttggacgggcactggctatggctgagagtacagagaaacatgccaggtaagattcatacctgtcccagggctaatagccaagaacatccccttattcttcttcttagtccatgggtggttttgcacttgaacaaaacttcttgtcatactggcatcatatactctctggtccgctcaaatagttctggcggttggaaatagccagagcactgattaccattagagtaagtgggtaaacctagagaaaacaaagggaaatgttaagtgtacttttaaggtcttcaaggaagttgagcaggttatttgatcttatattttaaattttatttaaagtaggggctgggcacggtggctcacgtctgtaatcccagcgctttgggaggccaaggccggtggattgcctgagcccaggagtaggagttgaagaccagccttggcaacatggcgaaaccctgtctctacagaaaattagctgggcgtagtggcacgctcccgtagtcccagctactcgggaggctgaggtgggagtgtcacttcagcccaggaaggttgcagtgagccaagattgcgccactgtactccaccctgctacagagtgagaccctgtctaaaaaagagaaaacgaatgctatcaccttagggagtgtgttctcacctgtttgtttagatgttatttccagaaggaaatacaaaagttacaggagggttatctgaggctattttgtgaagacttggcctgagaaatggctatattcatatgatagagatgtcaaaacttctctcccaggcttcaggcagtgatgtgtatcatcagtactatcatggagtcctgcccctccacctccagcttctacagcagtgccacagcgaagacccagcacaatggcatgaacaacatcattcggcttttcctgaagaagggactggttaatgacctggccagagtacctcacagcttagacctgtccaggtaaaatcatgccccagccccaggcttttccttctcttcagcctcactacacgaatgatgtggaggtagctggtgtagtgggaaaactttgggtacaagtgggagacccaagtctttcttattgtggcttttagcacttgtctttcttaaagccttggttcttacttgctataaactcaagagttgaactataatagtgatttttttttcaagcttccccccactttaaaaattaccacttattagaagattatatgtatattataagaaatacagatgagtaaaaataagaagtagacactgtattcctaccacccagataccatgattaccttattggtttattattcagtgtttttctttgcatgcataaataatgtattctttactaacatgatatgatacatgctattgtgttgggggaaatttggggcattttcgtttttattttcagttactggtcacttccttgctatgaaaataagtttcatcctacctaatgcccaaatccataattaagcatttttctccaaaccagaatccaattaaggacttgtattacatctggctatgttttctgaatctctcttattctaaaacaattttttttcattatttcgatctttattttgtttttgttgttcatgattccagcttgttgaagcgaccgtgtttttgccttctaaacttggtgcagttgcttccttgcagtgtagtttaacttaatcctttacttcctgatattttctgtaaacttctagttagatctagaggctttagaggcttattgaagcagtttaaacattttgggctgaaatgtgtagcctaggtgatgtatagctcatattgtatcrtgggagacacatctcccatgataattgtcactttttgttcttactagaaagtcatctctgttgttattttggcactttacaaatgtctacactatcaatcatatacctaaataatagccttaacatcagttgataattcttgcctggatcaattaatttctttgaggcttatgaataaaagctttctaatttctcatttcgaatacattattaactggcatttttctgtgttagcctcacagggaatgtctggttgtgctaaaatataatttctattataaaggcagtataaaaacttaatttctttctatttacatttgagattcaaatgtaggtttttttctggctttctatttttaagtcgtattatggactcgacttttcatgtttgttttgttttgaaactagtgattgaatttatttggatcactgcagtcactttttcatgctcaaattattacacctttgacctatgtggccccttcaagatgactaaattgtccttttgctacaaacctatcaattttttgaaacatttataaatgtcaaactcacagtactgtaatgaacaccatgtgtctacctagattaaccactgctgaacattttgctttatttcttcccttcctgtcctttcaggagctgaatcatttgaaattagttgaaaacactgtaaaactttacctctaagtacttgatcatctgtctcctaagaacaaatattcctttatatgggtacagttccattgtcatatccaaaaaatttaccaataatataataatactaaatttatacaattttatatacacatactcccagttatttcaattatgtctttatactctgagggagagtgttttgatccgggattcagtgagtatcacatgttgcatttggttgtcacattttttttttttatgacattttcctgttttgatgaatccaggcttgatgtcttatagaacatctcacagtctacattgatgtaattgctcccttaatggttagggtcaggttaaacatttttggcaaaaatactacatgggtgatatttgcccttctcacatcacgtcaggagacaggtgaataccacttggtcccaatacttgtgatgctaaatttgatcacagccgaggctggtggatcacttgagcctaggagttcgaggccaacctgggcaacatagtgggaccctgtctctgcaaaaaaatacaataattagctggacatgtacgcctgtagtcccagctttttgggaggctgaggtgggagggtggtttctgttagatttccactttgtaatgaataattccattactatcattattctttctgatactcagctgggcctgtggtaatgatcccattaattttttttccccatttttgttgttatttttcctctttatagaaacaggatctcactatgttgctcaggctaggctcaagcaatcctcccatctcagcctcccacagtgctgggattacaggtgtgagccatcacgcccagctgtcccattaatttttgaaagctttttggcacaatgagatatcccaggcttaccttatcccttccttgccctattcctgggatcacttgttctgacgagtcttggttacttttagtgtgatgtgatatcagagactgccatcttggtactactagtgagcatatatatatatatatatatatatatacacacacacacacacacatacatacatacatacatacatacatagactcacacataaatacacacataaagcagataaaagcagagctgctctggtgttagtgggcacctggttggtctcacacaccttattacacttagaaatcataccacacctccaactgcagcccctattgtacttttattgaactctaggaagccctacagagtataatttgaaattcacaggacttcaaactgttatcagccgggcgaggagggcaggttgcctgagctcacgagttcgagatcagcatgagcaacatggcgaaaccccatctctacaaaaaatagaaaaattagctgggcatggtggctcacgcctgtagtcccagcgacttggaaacctgaggtgggaggatcacttgagcctgggaggtggaggttacagtgagctgagattgtgccaatgtactccagcctgggtgacacagcgagaccctgtctccaaaaaaaaaaaaggaaaacttttatcatgttccttcctttgagcttttagggtttggggactaaatgctggtggtttaaaaaaaaaaatcctgagtacatccgagaagtggcttgcttgcatgtggtcatccagaatacattctgatttccagtcaagaatttgttactcatgtgctttccatggccccatgaaatatggcattgatttaactcttgcttttagggtgggttccttgaagacatttaagtcaaaattttttttttctaaacaaaagtagagtgttagttgtacgaccttatgccccttttctcttagtagattccattgtaagaagcttagtgtcatttagaagatagacacctagtatttctgtgctcagtccatctctttatcttcccttatctcagtcccaacatggccaacacagtcaatgctgctctgaagcctttggaaacactttcccggattgtgaaccagcccagtagcctttttggcagcaagagtgcttctagcaagaacaagtctgagcaggatgcccaaggagcctctcaagattccagtagcaaccagcaggacccaggtagggaatcagagccaatggactggagaggtgggagtagttgytttatgggcctgggatcacaactgttctggcttggtggtgtttccctgggaacttgctggccttccagagatctgtcatagtggcgtgggaatctgccccacaaagaattccttcaaaatgcagccttgtttggctrtcctcacacgtagccttgtcttttcctttgtcacccattcgtttattctctgagaacttacaaacttgcccaaggaagggaccttattgtctttgcgcttgcctcatggtgcccagcacrtaggcactctttgattattttgctggttggttgattgtttcaggcgagcctggggaagcagaagtgcaggaggaggatcatgatgtcactcagacagaggtggcagatggggatatcatggatggggaggctgaaaccgactcagtggtgattgctgggcagcctgaggtgctcagttcacaagagatgcaggtagggaggcagatcacccagcatttccctgttgcggcgctgaaccaaacccttgccaggtggtgtgggtgggtgagtactttagatccttgcctcaatgctggctgctttgcagaggagcatgggtgatatgcttagtagatgctcagtaaatgtgtttgtactgtattaaaagaggggtgggggcagggccaggatgccatgtactatgaaatgatatagatcccaaccagaaaacttaggcacaggtgaaatgttgaagtagaaagctgacctgagaccgttgggccccgggtctttgatttactttggctctggtcattattggaagctccttaacaccaccttatgcctatagcaccagctcttgctggggcattaaaacagcagtcttctaaagaccctaaaggaaagcattgtaatttctggagctggtagcattgggtaagaaattgggcctgtggtcctaagctgctggctttaaagagatctattatgtcttcctggacagtataaagacaacccagtatcagataactgggatggacccatttgaaggatagtctggttgtggattggtagcacgtggtagtttctgtgctaattagcaccgaatgtgtggtttcacgtaacatcctctgtcacatgttatcctagaaatgtatgctgctttgctggccttttttagggtttcggtgctagcacaatgatagacttgtgtgcatccatatatatgttctatttctctccaggttgagaatgagctggaggacctgatagatgagttgcttgagagggatggcggatctgggaacagtacaattataggtgagagccccagaactgagtatagcctcttcctttgcctcagtctctcttgggaggaccctttttctcatcatctgcttgctcagctctgcctaagggctcatagccagcctagatcgctgcttgtcttgatgttgacggtcttacagatgagaaattcacaagacgtctacaggcctgtggcagtctaaagtgttgcctgtgtgggggaggtggtgggagtggccattgatacagatgatacatcaagcacatcaaaagagtgtttattcatggaggcctagaggaggctgtagggtgagaaagcgctgcctttcagttcttcaatgaagtccaggggctttctgcccctgagtctcagtagtgtaaaaagaatgatcattccctgagggtggccctttataaatctcagagggaaaatggcaaaggtaccctactgtcacctggctctgagggtgtatgtgttacttgtttttactttgttgatcaaggaaatcaaaggataaatggaagtagacacgtattcttaagttttacaaagcttttttatacccagtatcctctgtggtttcacaattagtgggattggcagggcagatgtgatcatcctgttttacagatgaggaaactgagactcagacaggtaaagtgactggccaagctcacctagctagctgacagcagacaatccaggtcttctccctcatccaaaaaaaagtggatatctgctaggtgtacatagctactttagacgcacccagtctggaaagggaagtcctctgttgttcagtgaaggctctgctctgtaaccttcagtgagcagaagtggagaggatgaatcacaagaggacgtgctgatggatgaagctccttccaacctcagccaagcttccaccttgcaggccaaccgagaaggtgagagtgccgaggccagaaaggcctcccttcttgccctgcacgtctgacagacactacactagggttttcctggaggcagctgcccacatgtgcagaataaggaagcatctgtctgcatgcgctgacatacaccatccactttatcctcagccagtttttcaaataacatgttactactgcttgcccaaagtttgtcacttcttacttggttcgctttcttctcacccacctgctatcatcgctccaggttccctcttgccaacaggatatagtcaatagcaaagtagggctgaaaaggcaagggggcaccagcagacttggccaagtcctagaccatggctcctcaagcaccaccctctagccagcctccacattcagccaccctgctcagtgtgttgatgcattgattggcactctcaggaaatcgggtctggctcactaagtctgtacatcaccccagatctggttcttcctctcatagagtcagatatcccatcaccttcccactcagcctgctggcctgcacagtagcctgttttctagctactcagtttagtcctccaatgtgctccctttgttttagattccatgaatatcctggaccctgaggatgaggaggagcacactcaggaagaggacagcagtggcagtaacgaggatgaggatgatagtcaggatgaagaggaggaggaggaggaagatgaggaagatgatcaggtgaggggggactgygtttgggttggttcagatgacctcttccatgggaacatagagctgcagaaaaccaacagtctgggttgctagcctcagcgtctccctccctcatgtgcacatgtggccatggcaccaggcttcagaaaacccttacctccagcaattctccatctcctattttcccttaaggaggatgatgaaggtgaagagggagatgaagacgatgacgacgatggctctgagatggaattggatgaggattatcctgatatgaacgcttctcccttggtccgatttgagcgctttgaccgggaggatgatctcatcattgagtttgacaacatgttctccagtgctagtaagatacaggggctcagctgggtttttctctcttgattcttatacccttctctagggtaagccaagcagtggaccaaaccgatccgatacagacagcacttcttttcctatgctgacttcctggggcaagggatatctgaatccatctgtctcattagtgtatacttaggagaaggaatagtgagaggctgcttttgttcccttcacctcagtaaataggcagccattttagagcctggacaacttgatgatttgcttgattaaaaaaaagaaagagaccaaggctgactgcatcaggcacccatgtgcacaccacagtggcagggcaatcaataatccttatgtccataacacaagatcttgagggtttgaatggtcacctttgagcttggctttggggagcagatttgaacatactcactctattcatccaggatgcgtcttttcgggagaacgagtgaatctyttcctcccccatcaccgtgaaacttcccttttagcgtcaagttagaatcgagttcttagaatcaagctgtcttgatagggcaggtcttgacaacttaaatcacaagcatgatgtagcagaaaacactgaactgttctggtctgttttcttggccaattaatctcttacctctttgagcctcagtttgtcacctgtaaatgaaaagttcgagaaaaaaatgggttggattagataactttgaagataacatctatgattattttgcatttttgtgattttcatcagtttcccttagagttgagcctctgtccattcagcaaattgaacaatatttgaggagtgcctactgtatcctaggtactagggatacagcagtaaagaagaaaacagtcctcgttcctcataggagtggtttattaggaatcataactaagcaggcattacattgcactatagtaagagagcacagaggtaaagagttacctaacccaatctgtggaagtcaggcttcacagagaaagtgacatcttaggccaagaagagaagagcaggtaaagaagcgggagaggagtcttcaaggtgaagggagcagcatgtatctgaggggcctagaagcatcactgtgactgtagtgtggaaaatggattgggagaaggtactatttaggaggccgttgcagtatctaagtgagagatgatggcataagctatggtagtgtcagtgattgtagatgagttgtgggaatgagggagaaaggacaaagctcaggtttccgtgtgaggaagtaaggcccaggagacatgattctgcttgaacaaacatggaagaaatttctttttgacactgacccttttacatattgtccttgcagcagacatccccccatccccaggaaatatccctaccacccatccactgatggtgcgccatgcagaccacagttctctgacactgggcagtggctcttcaacaactcgtctcacccagggcatcgggcgcagtcagaggaccctaaggcagctgacggccaatactggccacaccattcatgttcactaccctgggaatcgccagcccaaccctcctcttatactgcagaggtgagttacagagatctgttggattcatcggagctcttgtaagaattttcactgtgctttagcattgtcttaaccttgggggaaatagtccatcacttaatgttcttgtcatacacacaaataaggtatttgttccatttctttgtggattacatgtgtagccttttggggagtgcagccttttggggaataccaaattatgtcaatagttctgcgcatgtatttagcaattattaagtgtctcatgccaagcacttaacactttagatatagacgggacaagatccctgccctcaggcttagagtttagtgagacaaacaatcttaagaagtaaaagaaaggcatataagtgttgtaatggttggtgtacagacgacagagagggtgtagtggaggcaatgtgacctgacgcagtgcctggcacgtgggagcttattgacacccacttggtgccaggaactatggaataatatacaacttaagtacaaaaccagggtggtattcagaaaaataacttagacttgtgtgcacatcatcaggtttataatcatgttctgcatttaatagaggatgcatgaagaggatctcatggtaacaggttgcagggcacctctggacttaacagtgatcatggwacccaccattaccctacaggttgcttggtccctcagctgctgctgacatccttcagctgagcagcagccttcccctacaaagccggggtcgggcccgcctcctggtaggcaacgatgacgtccacatcatcgcccgttctgatgatgagctgctggatgactttttccatgatcagagcacagctaccagccaagcaggcaagtttgtgtggtgaaagggagggtagaatttgtcagattctactttttccctgctgaggaaaagcaagacagtgtctgccctatagaaaacccccattttataggagccagaaccactcagtgacttagccatgggcaacaaaaactttattgtctctaggtacttgttatgttctaaacattgtgatrgaccttgggtccttttagggaaatactgcaatttttggatcggtggatcagttaatgcttgacaaggccaagaatctcattcccctttgctgtccctacaggaaccctgtccagcatccccacagccctgacccgctggacagaagaatgcaaagttctcgatgctgagagcatgcatgactgtgtttcaggtgcgtggcagcttggttatcagggcaatagtgagccttccagagctagggcaaacgtgtggagagttgtttccctggttctctgtggctacaagctctgcctcttggcttcctccctgaccccaccagagcagcctttgatttttgcctctttgaaacagtggttaaagtgtccattgtcaatcacctggaattcctgagggatgaggagctggaagaaaggcgagagaagcgcaggaaacaactggctgaggaagaaacaaagataactgataaaggcaaagaagataaggagaacagggatcagagtgcacaggtgattcccaagggctgggaggattcatctttgactgtgtctgccgtaatgtggttttggcatacacatggcaccaggaatcactgaagaatcctagaacgttcacgttgaacctgggaaattttttatttcaaattcaccatacattgacctggtttttaggggaaagaattcaaacctagaggggagatttctcaagtgtcaagggaaaaactggagccagaagcagaatggcttctcactcaacagtcacactgcatagtctctaccgccaaggacagcatcaagacaaggagaaaaaccttatctaagtccatgctcttagtcgcccacttccatttctgtcggtgaactgccagtgtggggaatcttaccgagatgaccccattccgtcatttgagtaagatcagcctaggtgtcagatcagagaaaatgtttgtactctgaaccccatcaccacatgtcattttttctagggctcacatgtataaaatcactaatacaattttggtttagaaggaagttacctacttttttctgaaacttctgggacctcagacagagatcttttaaatgtctgagtaaatgttgatagaattatacattacagtgtatcacttgatataaaagggggaaaaactgatagaaatacaaagaaataagacttgagagtgaaagactttagtataccctactcagcagttaaggaatcaggtagattaaaaataagggtagtgaagtgttcagttaaaataacaaggttgatctaacaaatatctttatatagaactttttacctaatacacacattgtttcaaacttgatataggatgaaaaataagtgaacctagcctgtgactgaaaagactagagtggacaaaataaaaaataagccccatgaagggaaaaaatacatagatgaaaccaagaaattcttgctagaatgatcatgatcgtgcccatccctaaggggtttttattatcctttccttccatatttatttccccctcagccccaaacaattcttgaacctgagtatgtatagagaaattggtcatatatttgcacagtgaaatgatcaccttcctttggtcacatggccaaagcattctccattagatcactgaactcctagatggtctgggtggaggatggtgactattacagttgacctctatcttaggtgcttgcaaagtyccacattggtctatcccttctttttgcagtgtactgcatctaagtcaaatgactccactgaacagaatctctcaggtaactctccttccctttctcccttcttactaatcaattggttgcttctttatcctgatagttccgagtagctggcccacataggctgaagatggacactggtgctctgtgggatgaggtagtagattgtatagttttagggtcataccccatcttggagataactatacagtctactgtctttcccacggtggtacacttcttctccgactggctctgttcaggttcttgttctggttattatctactttgttctggcatgggtaatgaggtcatgtgtcttgttcatttcctgactgcaactctgtcctctgaaacagcatgttcatgtacatctttgaagtggctggtcctttgatgaccaccatggtgtggcacttcatgagaataactgatgacagtggttctcaaatgccagtcctctgtggaaacgaacaaaatcaaggagctttaatgcctttttcataaagctgaatttattccatttaaaaggctgtttttgtatttagagatcatattcctaattctgtggtaccaaaatatttttattaaatgatgttgattggatgttttttcttacatggctaaactaaaagttggcaacccctacattagtctctactttttgttctttttttaattaaattttattggtccatggaatctaaaagtctaggaacattgtcttggatagtgtgctgttcatgaaggtagctctctgggcttagtggtatgactgccgtatgtttcctattccctctgatcttcttaacaatggtcagtagccattttgtgattctatcagttggttcatgtgatatcatatgtctcccccacccatatttcctcagaacattcttctgcctccctacacctgtctcctttcgcacttgagttggaaaatgattgtaccaaagcctgcacaatattttttaaagcagtgaagtagggtagatgccttggtacccttaatctagcaaaagatctttaaaagagtctgtcaccatgtaaaatggccttttgcctgctgcccttattagaggattctgctcatgccagggtgaggtagtaagttgtattgttgtggggtagggatattaggccccaattagaagataactatacaacttactactttccctggtgtgtggcatattcacacttagtcttagcagtgttgcctccatcagacaaagttgtagatgttccttggataatttggactggaagaaaagagacatggaaggggacagatggtgtttagggtgaggcagatgtcattataaagtgacttgtctttcattaattggagcatataattattttacctttgggcatgaactcattttgctattcttcaactgtgtaatgattgcattttattagtaatagaacaggaatgtgtgcaagggaatggaaagcatactttaagaattttgggccaggcgcagtggttcatgcctgtaatcccagcatttttgggaggccgaggcgggtggatcacctgaggtcaggagttcgagaccaacctggccaacacggcgaaaccccgcctctactcaaaatacaaaaattagccaggcttggtgacactcgcctgtggtcccagctactcaggaggctgaggcaggagaattgcttgaacccaggaagtggaggcttcagtgagctgagaacacgccactgcactccagcctgggcaacagagcaagactctgtctcaggaaaaaaaaaaaaaaaaaaaagattttgaagggctggacgcagtggctcacgcctgtaatcccagcactttgggaggccgaggtgggtggattgctagagcttaggagtttgagaccagcctgggcaacatggcaagaccctgtctctactaaatatacaaaaaattagtcaggtatggtggcacatgcctatagtctcagctacttgggaggctgaggtgggaagatcacctgagcccgggaggtgaaggctgcagtgagccatgattgtgccactacactccagcctgggcaacagtgagaccctgtctccaaaaaaaacaaatagagttttgaacgaaattctgaccatttcttgctccaaatagatgaagtgggaggatcaataggattttggtagttagattttctgtgtacctataggtcagagacatttagcctcaccctatatggcctgaaatcttcccccttccacctgcagggcacagaaaggattttattcttagaatccacagagtcagagctccagttcttgcattcttgggacagagatagcactgtgccttaaccttcatccttagtataccagaccagagatgttccttggagtatttttgttgtggggatgatcactggctgggtgggatacttatcaggccacatttgctgattggggtggctcccctcatcattggctggttgccccttaaccactattattgttctttccgagaaagatgggacgcctatgcctgacagctacccaacaaccccatcttcaactgatgcagctacatctgagtccaaggagacccttggcactctgcaatcctcacaacagcaaccaacactcccaaccccaccagctttgggagaggttcctcaggagctgcagtctccagctggagaagggggcagctctacacagctattgatgcctgtagagccagaggaattgggtcccacaaggccaagtggggaagcagaaacaactcagatggagttatccccagctcccactataagtgagtagaatttcaacatttggggaggatgaaacaagagggaagaaaggatgtctttgtagcttctctttgctcttttgcttgagagaaatagtaggagttcaacttctcaaataataagatctcgtcttgcgcattcactttcttaagtgaagttgaggtcctgaactggtgatagttgaatgtctaatgatattggtgatgataccaacagttcattgaggcaattactctgtttctgggctatcaccccaggcttattatttaaaaacaactctccagctgggtatgatgactcataatcccagcactttgggaggctgaggcagggggatcatttgagctcaggagtttgagaccagcctgggcaacatagaccccatctctattggggggraaaaaaaactctccaaaatcgatggtgttatttacatgagtaaactgaaactcagaaatgaaataattagcccaagtcactctgtaagtggttgaactagaattaaaacccagatctgtctgactttaaagattactctctccttccacagttcccaggatggcaagcatgtcatcccacacttagagctctcccattctcctggcagacactgtttatctcatgacactatttctcactggtttgaaatggggcctgaaaagtcttctcagcagtatttcaacaggataaattgatacctgcttgccatccctgctctataccatcttgcttgtgaagttctctggagagaccctaaggtgtcagttttttctttcaaggaaccttgtttattttattttattttattttatttatttattttttgagaaaaagtctcgctctgtcacccaggctgcagtgcagtggtgtggtcttggctcactgcaacctccgccacccaggttggagtgattgtcctgcctcagcctcccaagtaactgggactacaggtgcacgccaccatgcccagctgatttttgtatttttagtaaagatgaggttttgccatgttggccaggcttatctggaactcctgacctcaggtgatccacccgcctcggcctcccaaagtgcttggattacaggcatgagccactgcgccctaccgaaaccttgtttatttagagaactacagggatatgcacgtgcaagtggtgcctgcagtgaatcaaagtgaaaaaatcccttacccgggctgggcgcggtggctcacacctgtaatccaagcactttgggaggccgaggcaggtggatcatgaggtcaggaattcaagatcagcctggccaagatggtgaaaccccatctctactaaaaatacaaaaaactggccgggcgtggtagcaggtgcctgtaatcccagctcctcaggaggctgaggcagagaattgcttgaacccaggaggcggagattgcagtgagccgagattgtgccactgtactccagcctgggcaacagagtgagactccatccccctgccaaaaaaaaatcccttacctggtttgcctagggaagatgtttcacaggcatgcctggaacacagtaaatgttcaagaattgatagaaagggcttcagctgaaccttagaaatctcaaagtgagattgagagggggacagcaagggagaagtgagaagtctgagctgagatgcccctaaggaagcagccctatcaaagaccttatctgtcattttgccccggttccagatagaaacctaacctctccctgcaacttcttcctagcctcactttccccagagagagctgaggattctgatgcactgacggctgtcagcagtcagctagaaggctctcctatggatacaagcagcctggcttcctgtaccttagaggaggctgtgggtgacacttcagcagctggcagttctgagcagcccagagcaggcagctccactcctggggatgccccaccagctgtggcrgaagtgcaaggcaggagtgatgggtcaggggaatctgcccagccacctgaggacaggtaagcatgtgtgggcaaaagaagggtaggatatattggagggtctttcaaagcacatttcatactcgtcaactaatggacatgcttgttatgctggggagataaagctggtttctgtgagaaaggggtattgtagcagtgttttataaacgagaagacataatacagacagcaacctgagcatgatttcsctcagctccccacctgcatcctctgagagctcttccaccagagattctgccgtggccatttctggagcagattcccgaggaatcctagaagagccgttgccttcaacaagcagtgaagaagaagatccccttgcgggtgagttccgtgtatgcccaggtcatcctgggattgttttggcttctagtagcccttggcatggaaatgcccaccagccaaacagttccatttagatggagggcatgtatgtgggaggactgacaataagcgggggtgctggtatggcataatgaaacgggtccagccttaggagtcaaactgatcttggctcactcaaattcccccactctgccacttctaccttttacaacctagggtcattatttaatttctgtgatcatgaatgataccgagggggtgatgatatctgcgtggtaggttatttatgaagggtaagtaacagtgcatgcagtctagcaaataacaaaagctgttctgagcccagggaaggtggggtgggccttctctgtgtcccatgtcttgcaagcagtgaagacatatacactggtttccctcaaggagtgacatgggtttattttctccaagtacatattaggcaccaatagaggtgtgagaggctgggygcggtggctcgtgcctgtaatcctgaaaatttgggaagcagaggtcagaggatcacctgaagccaagagtttaagaccagcctgggcaacatagggagaccccatctctacaaaaatatatatgtaaattagccaggcattttggtgcatgcctgtaatcccagctactcaagatgctgaggcaggaagactcgagcccaggagctcaacactgcagtgaggcaagggttgcaccactacactccagcctgggcaacagaccaagaccccgtctcaagcaattaataaggcgtgaatccctttacatgttatatctcccttcaggtatcagtctccctgaaggtgtggacccctcttttctggctgccctgcctgatgacatccgtcgggaagttctacagaaccagctaggcattcgtccaccaacccggactgccccctccacaaatagctcagcgcctgcagtggtggggaatcctggtgtgactgaagtgagccctgagtttctggctgccctgcctccagccattcaggaggaagtatgtgagcgggaaggtggtggggccaggctgcctggcaggagaaatgccctcattgactttttctgctccataggtactggcacagcagagagctgagcagcagcgacgagaactagcacagaatgccagctcagacacccctatggaccctgtgaccttcatccagactctgccctcagacctgcgccgtagtgtcctagaggatatggaggacagtgtgttagctgtgatgccacctgacattgcagctgaggctcaagccctgagacgagagcaagaagcccggcagcgacagctcatgcatgagcgtctgtttgggcacagtagcacctccgcrctctctgctattctccgaagcccgggtacagagggaggcaagtgggagggctctggaaagctttagccagatgaggctatgttttcttacctttgtattacctatatccagtttacaccctctccacaatctcagttttctttttctttccttccagctttcaccagtcgcttaagtggcaaccgtggggtccagtatactcgccttgctgtgcagagaggtggcaccttccagatggggggtagcagcagccataacaggtacctttgtctatttttaccttaccatatcaccactcaagtctattagcccagctcccttagttttataggtggagaagctgaaatcctgacaggcaggatggatggtctctctaagccatttccttgaataagtgagagagccagatctttggactccccattcagaaaactacaccttttggttagtcttgctaccaaagaccacaatcgcaaaagcaggccggcagcaggtgctaactatggttttaacaagaaggaacaccacttgtctcccatgcaagtagtaaaacaactaaccacctgccttgagtttgtaacacctaggctaaggaagtatagaggagtgagttagccaggctaaaacagagtgggcctgacatgccaaaatgtgaaaggagtgattggttcctacaaggccacaaactcctggtagtctagagaaggcagaaactagcattgtctcctagacttaggtatggtcagattttaccagtcgatggatgatacctgggctggaatctctgctgtcttctcagtcgccgtgtgatgtagggcaagtcacttaacctgtttgagcctcttgtttatcatctcaaaaatgggtggttctcggccagttgtcgtggctcacacctataatcccagcactttgggaggctgaggcaggtggatcacttgagtccaggagttcaagaccagcctaggcaacatggcaaacccaatctctactaaaaatacaaaaagtagtcgggtgtggtggcgcgcactagtaatcccagctactcgggaggctgaggcacgagaatcacttgaatcctagggggtggaggttgcagtgagccggtatcacgccactgcactccagcctgggtgacagagcgagactccatctcaacaaaaagctggtgggggtggggggcttcattctctaagctgtacagcagccctgaaaggatgatgtacagtcattgtaaagtgcctggtacatagtagacacctaagagggcagctgttactatgaagagcccttggactggacacccacctttctcaagcctccttggagatacctagctcattcccctcccccattcttatgcctaatcccagagctctagccactgaagtgttacccaaaaaccatgttctgtttccaggccttctggcagtaatgtagatactctcctccgcctccgaggacggctccttctggaccacgaagccctttcttgtctcttggtcctactttttgtggatgagccaaagctcaatactagccgtctacaccgagtactgagaaatctctgctaccatgcccagacccgccactgggtcatcygcagtctgctctccatcttgcagcgcagcagtgagagtgagctatgcattgaaacacccaaactcactacaagtgaggaaaagggcaaaaagtcgagcaagagctgtgggtcaagtagccatgagaaccgtcccctggacctgctacacaagatggagtcaaagagctccaaccagctttcctggctctcagtatccatggatgcagccctaggctgcaggactaatatatttcagatccagcgttcaggggggcgtaaacataccgagaagcatgcaagcggtggctccaccgtccacatccatccccaagctgctcctgttgtctgcagacacgttttggatacactcattcaattggccaaggtgagggtttcaaacccaactcctggggatggaagaagggtggcagcaagagcctgggtgaaagttgaacactaagcaggctagcgtgtctttttgctcttattttaagtgttgagccctgtattgtttctaggggattgtcctatatatttctggggttttttcttcattcttttccatttttatgtatgtcttatttagtcatcaaaacaactgggctgtatgattcctgttttacagatgaagaacctgagattcagaacattttattcattttgtcttatgattagaaagtgatggagctggacctagaatttagtgttctttcaataataagcattgctgccatctatcaaaggcctgccttgtgccaggcactgtgcaaaatacatcatgtcgtttaatctccaacaactttgcaaggaagtgtagttatctccattttataagtgcgagactaaagctcaggaaaagtttgctcgtgagtctgtattgctacaaagccctcattcatttctctaggctgctttactgtctgttggataaaactcttatatgacatatcccccaatatttaccaaaattgtctgaaggagtctgggaaccagttgtcttttccctatcaggaaggctcatcctctgtgaagacgtcctagaccaagccttgtcctccttttcccggcaggtatttcccagccacttcacacagcagcggaccaaagaaacaaactgtgagagtgatcgggaaagrggcaataaggcctgtagcccatgctcctcacagtcctccagcagtggcatttgcacagacttctgggacttattggtaaaactggacaacatgaatgtcagccggaaaggcaagaactccgtgaagtcagtgccagtgagcgctggcggtgagggggaaacctctccatacagcctcgaggcctctccactggggcagctcatgaacatgttgtcacacccagtcatccgccggagctctctcttaactgagaaactcctcagactcctttctctcatctcaattgctctcccagaaaacaaggtgtcagaagcacaggctaattctggcagcggtgcttcctccaccaccactgccacctcaaccacatctaccaccaccaccactgccgcctccaccacgcccacaccccctactgcacccacccctgtcacttctgctccagccctkgttgctgccacggctatttccaccattgtcgtagctgcttcgaccacagtgactacccccacgactgctaccactactgtttcaagtaagtgtggatgtagactgggagctgtggggtatatactgtggcacccacttcacccccttttccatccagatagttctccctcagtgatagcaatcagcttggtttgtgtttgtgagaacagaatgtgttcattctcaccctcatctgtcccagttctctcactctgtctcccttcctccatccccgtctctctgtgtctctctctttctctctctcccctgcctctcacacacacactcttttgaaggtcagcaggcattcactgaatgtagcttccctaggctaggcaccagaaggaggaaagaaagttaagttccatcctcagggaattcccagcctttccagttgtgttgagggagccagttctcatgggaaatagttcaagggcgggcaggatacagtgtgattcagagtaaccagatcatcccaggaaataaaggtaatgagccctgccacagattagtaagaaagaattatctgaagaagtaggttttaaagaatagagtgggccatgatggtgggggaatagttggaagaaatgcctggggtttctttttcagcttagaagttacagtcataagagtcctctttgagtttatggtgagacgtgattgtgccactgcattctagcttgggcaacagagcgagaccgtgtctgtaataaaaaataaaaagcctttatcatcccaagtcatttagatttgcctttggtgggtgggttttctttttcagtactttcccattttgaagccctgggcaattcagcgattccttgattttgtcacttagtccctggcttgtgagtttcagagasgcttacagtgttctgtctgtttcctcaaagtttctcccactactaagggcagcaaatctccagcgaaggtgagtgatgggggcagcagcagtacagactttaagatggtgtcctctggcctcactgaaaaccagctacagctctctgtagaggtgagtccaagctcttctgatctgctaagacttggggagaaaggataaacagggtagataatgattttgttctcaggctggggcttactccttctgtcttctttttctcaggtgttgacatcccactcttgttctgaggaaggcttagaggatgcagccaacgtactactgcagctctcccggggggactctgggacccgggacactgttctcaagctgctactgaatggagcccgccatctgggttataccctttgtaaacaaataggtaatagcagaagtaaagcattttctctttctgaaggtttccacttaggtgcttcctctttctggaatcctttcctgaatccccaagctgaatcagatacctccatatccctataacacagcctccatgctccctctgtcgtaacacagattaccctgggttatcatctgttttcctctgctcagttgtttgaaagcaaggctgggtttgtctcctcatccccgctgcccggcacacagtggtgcttaatgaagagaaaagagaacacatgggaacagcagcgcctcctttcttctccatgctgggcactcgtaagagccccataagacagctgaggcagcttcaccccttcaaagtatgtccctacactgcattcagcctcaggaattacagagtcagaatagtactctctgcttttgtgtaattttgagggtataaaaattctaagaacagttacaaattacctcgtttctatcatcttcctccctgttttactgagaagaaagccaaaacccagggtgataaagtgattggaccaaggagtacagccaggttttctttcaacatagagtctgtctaccctgtcccaccctcatcccaatcatgagtctccctagatcttggctacatacttagttctctctctccttcacccccatgtccctaagtctggggtgataggagagttggttggcctgtataactcagggtgttctttgctgcatgaaaattacaacgttcttccagaaagaatttggcctctgacctttctctcttggctgccaccatctattccacacctatgggccaggcactgtctaggcactctaccatataattatctcttaattgtcacagcaacgttatgaggttaggcagtaatattcccatcccagtattaatattggttagcaaattgggtaaggggtcaagaaatttgcctgaaaccaccacagaacctcagtaattttgagagatatatgggatttcaaccatggtctgtttagctccagaggagatactgtttctcttctacatgaaactcatttcatgcagattcagcagatccctgtggccataggtaaattggtagtcccaggtgacggttcgtggacacgcataataagctgaacagagcacgattccagctcactctaggttctctgcagctgagcaatgaagagtggcctaagcaggtgtcttagagagatttggcttttagccactttaccaggggagtctctgaacacttgctgactcctctgcctgctcaggtaccctgctggccgagctgcgggaatacaacctcgagcagcagcggcgagcccaatgtgaaaccctctctcctgatggcctgcctgaggagcagccacagaccaccaagctgaagggcaaaatgcagagcaggtgggtggtagccaccctttggctgggggcttgaatctgggatattctggaagatggctcttgctggtttcctggtcttttttatttctctgggtgattttcgtatctttcctatacacacttgacccatttttttctacttcctacttggaagatttccttctgagtttccttacccctctggttgacaccaggaagccttgcttgctttgggtgtttatactttgatgctgtcaatatacgcaagccacctctacactatccaggtttgacatggctgagaatgtggtaattgtggcatctcagaagcgacctttgggtggccgggagctccagctgccttctatgtccatgttgacatccaagacatctacccagaagttcttcttgagggtactacaggtcatcatccagctccgggacgacacgcgccgggctaacaagaaagccaagcagacaggcaggctaggtatggaactagagtgtccagttgaggggaagggttggtggcggtaaagccagattccttggaggtgcaggacttaacggcctgtctccttcctgtttgacctttccaaaaggaaaatgattatccttttttcagaatgttgatggctgcattctacatctcattcaagctatctgcgtaggaaattcattagggggagtgggaattaagggggagtggaaatctggcagggaagttgggggccagccttttgctgaacaagacttaactcactaggtgcatctcctttctgcttccttggtcatttctaactaagccgtggcttgacaaatcattttccctacctctttcctcctgtcccacagaaccctctcgcacaaaaccatccrtctgtctagcatcatgccccctgcccttatctgtaatggtaaatcttagcgcctgatgatgagcactctgaagcttcctgagctaaagctcaaaagacctcagcaagatgccctgtggcagcccaggagataggagagagaatattgggctttccctcttcctatattttatatcttgccttcctctttctctttctcccaggttcctccggtttaggctcagctagcagcatccaggcagctgttcggcagctggaggctgaggctgatgccattatacaaatggtacgtgagggtcaaagggcgcggagacagcaacaagcagcaacggttagcatgatgcctgtggcccctcattcatttgtctctccactcatccccccaccatgtcatcagtggggtttcattgcctttaccttgtatgcttttgcattaagtttgctatatgaatgcttctggacaaaagggttactttctgttggtgttttcctatttgttgattggtttgttggtttgatttgatttaaagcttggccatcataccccactcccagctatccagtcaacagtggcgcttttgcaaactgcctgatgctaagtgttgtctgggttctgaggggttatggggtgaagttttttttcagtcccatggaacaatgcaggtacatcagaaacatctcaggaatcctaccattgaaagtcccccaagcttggtacatatcccacacagccacttctgtctgtggctgctccctccaccctgccctctgcctttattctccataatcccttggcacctaggcactcaggcacttttaggaggaaaccttcaggtacttaagtagccagctcagtgttggggtcccggcattgagtggctgcagtaaaagcctggcatcacatgtgtatgctgtggcactccctcattgttttcctgtccttgcaacatgtaagttacctttccaagatccaagaaaggtatcctaagacccgatatttctttgcgtataattactattatacagtatggttttattgagtaggcagggaaaagccttgaacttaggggcagtgactccaggaaggtagaaagggaaaataaagctgttattctggagtattttttctgccgagtctctttcccattacacgaaaagatgtcggctttttaaataatcccgctcatgagaggttgctctaattctcctattatttccccttttgtgagcaaacagaaacaaagagcagacctaccttccacccatctgaattttttatacacacacacacacacacacacacacacacacacacacacacacacaacagaagaagacttgaagtctatatacaggaggctagttctgactggtcacaggtctggattgtagactgtaggaaatgtaagcatccaaggagctgttgggaaaagcttacaaaacacagtggagaaaagcagaagagttgggaaaggcatccttttgtcctggatagctacagttttccccacccaaatatgggaagcttctttgcaagctcaatgtatgagaagyggaagggccaacctctagcctgtctctaaggaaagcagagttgcacccttatgtgatttttgtctcccttttatccagtcggagtctagccagtcagaggcgtctgtccggagggaggaatcacccatggatgtggaccagccatctcccagtgctcaagatactcaatccattggtcagtactacttcctgtttccagccgagcaaaagggatagccagtcttctggaatgtctgctgaatcccctgctcccagcatatataagcccagtgttttcccatttgttccagtaaaccctggtttctgtaaatgatgacaggtgtttgacaaccaaggcacacttttctttcctgtagtaaaggaaagaaaatggtgggatatcatgcattcagacagcatgtttttatggggttttctcttgttgtggtggttgtttttgagacagtctccctctgtcgccaggctggaatgcagtggcacgatgtctgctcactgcaacctctgcctcctgggttcaagcaattctcctgtctcagcctcccaagtagctgggattacaggcgcccaccaccacacctggctagtttttgtattttttttagtagagacgagtttcgccatgttggccaggctggtctcaaactcctgacctcaggtgatccacctgtcttggcctcccagagtgttagaattacaggcatgagccactgcgcccagcccagcatgtgttttaaatcttttgttttattattgaggcagggtctttctccatcacctaagctaagatacagtaacatagtcatagctcactgcaacctcaaacttctgagctcaatcgatcctcctgccttggctatctgagtagctggaactgtaagggacaggccaccatgcccagctaattttttttatctttgtagaaatggagtctcactatgttgcccaggctggtcttgaactcctggcctcaagccatcctctcacttcagtctcccatgtcttctttctttcttttttgttttttgacacagagtctagctctgtctcccagggtggagtgcagtggtgcaatctcggctcactgcaacctccgcctcctggattcaagtgattctcctgcctcagcctcccaagtagctgggattacaggcgcctgccaccatgcctggctaatttttttttttgtatttttagtagagacagggtttcgccacattggccaggctgatttcaaactcctgacctcaagtgatccacctgcctcggcctcccaaagtgctgggattacaggcatgagccacggccgaccagccttagtctcccgtgttttaaatcttggctcccccatttactgcttctgggacctgaggcaaacctctttgttaggtttccttgtttaaaataggaatgttcagttgttaggattaaatgagttaaaacatgtatagtggttagagaagcacacgatgaatgctattgttagcagcatttctcaaagtcagtcatacatagaatacattttggcaccctcataacacattcccatggaatagtattcttgtaggacaaccattgttatcctacctttcatcaggatttggggagatagatattattttcgtgttctgtattcaccttcttttacctaaggtcatatgatttgcaagtaccggagccaggattcaaacctaaggctgtcagaaccttgaagaatagtcaggatttgggtaaaggatgaacagcaaaggtcaggaagaaacctaagcagggccaggtgtatggggatcaggggttgatgagaaaacagtcacttactccccacccagaagatggggttgtgtcttgctgcttagctactgagcagaggttagaataagcccccagtgagtatcaggaaaagtaccagccatgggattccatctgtcataccatggcttctcagggttttaaactgccccaggacaagatgactaatttagaaggcattagaaggccgggcgtggtggctcacgcctctaatcccagcactttgggaggccaaggcaggtggatcacgaggtcaggagttcaagaccagcctgaccaacatggtgaaaccaagtctctactaaaaatacaaaaatcagcygggcatggtggcttgtgcctgtaattccagctactcaggaggctgaggctggagaatcgcttgaacccaggaggcggaggttgcagtgagccaaggtcgcaccactgcactgcagcctgggcgacagaacgagactgtctcagggaaaaaaaaaaaaaggcattagacttaaggttagaaagatttagtttgatgtcctggtgctgtcttcctcagaaaccaaaatgaggaaaagacagcctactttccaaggccagctgtcagaattcaatgacaaaagtgtcctaaaacatcctgtgtaaactggaaggcaaccatccaaagctccactgttgttacattaccctgaaataatccacagattctcttgaaactagtgaggcagtgactagactagcactatctggatctgcagtagcacctgtggcttttgagcaccttaaatgtggctagcgcaactgaggaaccagattcattattttatttattctgtttaatgtaaatgccatccaatgcaggtcctagaccttgtttcagatgttgctcggtgagtaccactcagtggccagtggtcccctctacttgttctgtatattagttggtgcgtgtggtctagaaagatctaagcagaagggaaattttgaagactttctgactctcttctgtgtgccctccagcctccgatggaaccccacagggggagaaggaaaaggaagaaagaccacctgagttacccctgctcagcgagcagctgagtttggacgagctgtgggacatgcttggggagtgtctaaaggaactagaggaatcccatgaccagcatgcggtgctaggtgagttgtgtcctaaaggcccagstcccaacccagtggtctgctctggggcycttcctgccagcttgtttttcttccttccaggttactcctctccctcagtgtctctgtaatgagaattcaaaagagaagtgttttttctctgacttcagtataaaaaagattgaccttctcttttaatagttggtgtctttcactttatagacaaggggaatctttataactggttagctatcccatttttctttggcttcaaggaagttcctctgtgacttgattctaccatatttccctgcaagttctcattgtttcttttttttttttttttttttttttaaatcagaaatgaggtctcactatgttgcccagactgatctcaaactgctgggctcaagcaattttcccacctcggcctcccaaagtgctgggatcataggtgtgagccaccacacctagcctagttttcactatttcttcttccttatttatttttataatttgtttatgatggcaaagaggtttgcatgttgaagtttgcagagtaaaatgttacttctccatcattcctaaccctagtgctacagcctgctgtcgaggccttctttctggtccatgccacagagcgggagagcaagcctcctgtccgagacacccgtgagagccagctggcacacatcaaggacgagcctcctccactctcccctgcccccttaaccccagccacgccttcctcccttgacccattcttctcccgggagccctcatctatgcacatctcctcaagcctgccccctgacacacagaagttccttcgctttgcaggtacagggaacttttaggctgccaggtgtagaaggcttcattttaaacaggattgtttcatacagttaatccttagttgatgagagagagagagagagagagagagagagagwgwgtgtgtgtktgtgtgtgtgtgtgtacatacacacacccgtgcacgtaaaccctgcatggtttcccttggcctcaggatactcaggtttagaatagaaatgctcagattcacgttcacacctcaagggctggcccttggttttgactagtccttttagagccctgaaataaggaagaggaaggaagagagagttgctagctggttggctgtcttacagcttctggggcagatgatgtgcttaattcctgctgtcacttctcccctcagagactcaccgcactgtgttaaaccagatcctacggcagtccacgacccaccttgctgatgggccttttgctgtcctggtagactacattcgtgtcctcgactttgatgtcaagcgcaagtatgtgtcctggatattggggggtagaggggtggtgagaactccccaaatggtaactcgcctctgaagttactcttgaggccacaaatttcctttggtgacagcacttggaatggtggtggtgaggagggaagagacagctgtagcattgatggccatcatacctaaatactcctgggcttctccaccccatctgcatttttcatcagcaaaacagagtcacatgatttttgaaccacacagtttctaaagttctgttccatccgttgggggtagtacaggaggcacaggtggccatagaacacacacagcagggttccaggggcttccacaacactcctggagtcatccctatgcctctccttctcctcgtgcatgtatacatgcttacctgcttgtggcagaaatcacatgtcacaatctttgtgggcccttactcagtggaggtaagaaaaatttagagttggtaatgagtgatctacctctcccaactactgggcatttcccaaacaggtgtggagcagagatcaaagtgtttggaggatagaaggagcatcattgtgggtcttcttcctaatcacacaaacaaatttgttctgccacccttaatcctatcttccttccttttctacctcccaagatatttccgccaagagctggagcgtttagatgaggggctccggaaagaagacatggctgtgcatgtccgtcgtgaccatgtgtttgaagactcctatcgtgagctgcatcgcaaatcccccgaagaaatgaagaatcgattgtaagggcccaggaacggagaaaagatggcgggtgggaggtggggcctcctgcacagtagcgatggcttgctctagcctcaaatttagggaggtgctgccctccctaataggaattccccataggaatctggttttagataatcttactgagttgtctcctatcttctgggcctgccctgctggctggccctttagctaagctacccaacaattcccagacagacaggaaagtctttggtgtttataaggatatacctgctggctttgcaatgagagctttaatattgctataytaggaatgaccatgtatgagtggcctccaccaaactggtaactgctcactggtgattctgaagccacctagaggagatcagcagtttgtaatactgagcgtasgagctgatgagatgaaagacctattggagttgtttaatgattcctcccyatctcttgtggtgtgggctctccaactgtgtaatcacaagaagtcagggagtctccctagacagactgtatgccatgttcttccaccaccaaatacctttagagaatttggactctgggcttatccctctctaataccacttttctcccctccccacttmacctaagcaaggcctcatttatttctctgatacctttcctattggtgttttctggaatatctgttaaccttgactattttgggacatctcctctgtcagtggtgcttttgtttgctcccagatctccaccccatttctgggctgtcctggcactctctgtttacctcttcatctgacactgcactccccagacactgcttcasagtctctcactcacacaaatgactggatgtatcctgggttttctgcacagctcttttctgcttctgctttcttatgcaggtatatagtatttgaaggagaagaagggcaggatgctggygggctcctgcgggagtggtatatgatcatctctcgagagatgtttaaccctatgtatgccttgttccgtacctcacctggtgatcgagtcacstacaccatcaatccatcttcccactgcaaccccaaccacctcagctacttcaagtttgtcggacgcattgtggccaaagctgtatatgacaaccgtcttctggagtgctactttactcgatccttttacaaacacatcttgggcaagtcagtcaggtgaggatgaggcatagtcctgggactgtcttcagtcctgggggtctggtctttttgtgtcccatccttgtgctccttyttcccccccactcgcaaaccatgaccctgtataattgtgtttttctagatatacagatatggagagtgaagattaccacttctaccaaggtctggtttatctgctggaaaatgatgtctccacactaggctatgacctcaccttcagcactgaggtaggtcaggaaatcctaatcacagcacatcccagccaatctggaagatccattccaggttcaccttagaactagcactgcgtgaccttctcatagttctaaggaagcatcttgacttcttaaagctgtagcaggtgtttgtgagtgacatcacaaacaggaaaaccagaatttgcaggccatttcctagtttcacctttattaaaaaaaaaaaaaaaaaaaaactccagtacataattcctcattcccaagggtaggtctttgtagaaaaatcgtacaaatgtaagtggggggaaaatgaaggcagttaaggttactcttctcctaaattcttttcctaagagattacattccgttacatatgttagccattcccttttcccttttaccactgatagttgccttactctcttctgccttttttgtaggtcttaragccaaagagtattttcctstttcctacccaaagcctttccctataaggggagttgcgagctatgagtagtaraaaaagtcactgttttgtatggacttgcctcatctctctgcctaggacatggcaaggggtttagggtgtgttcctaggtatctaatcccatcctaratgaagtctgatatgtatgattggtgttttggttgttctaggtccaagagtttggagtttgtgaagttcgtgacctcaaacccaatggggccaacatcttggtaacagaggagaataagaaggagtatgtacacctggtatgccagatgagaatgacaggtaggggaaatgttcctagacctctagttgctcaatatgagaagaggtcggacttgattcatttgataggcatgttttgttttcctctgctatgacagagccacaaatgccttgcacaaaagacaaaacacttgatcaaaaatacttaactttgggcacggtggctcacacctataatcccagcactttgggaggccaaggtgggcggatcagttgaggtgaggagtttgagaccagcctggccaacatggtgaaaccccgtctctactaaaataaaaaattagccaagtgtggcagcgtgcgcctgtagtcccagctactcgggagactgagacagaagaattgcttgaacccgggaggtggagtttgcagtgagctgagatcgcaccactcttctccagcctgggcaacagagtgagactccatctcaaaaaaaaaaaacaaacccagcttaacttcactggacacagtggctcacatttrtaatcctagcactttgggaggctgaggcaggaggatagcttgagcccagggggttgagactagcctgggcagaattaaccagttgtggtggtgcatgcctgtagtcccagctaacagtggtagatgggagccagatgggggatctctgacctctacggttgtgtgagtttagaagtcatttggctttttggttatctcaccaggagccatccgcaagcagttggcggctttcttagaaggcttctatgagatcattccaaagcgcctcatttccatcttcactgagcaggagttagagctgcttatatcaggactgcccaccattgacatcgatgatctgaaatccaacactgaataccacaagtaccagtccaactctattcaggtgagctgctgctggcatccctcctcatatggtcctcttaccctaggcaacgctagtttgtgtrataccaaataaaccagtagtactcttagaggaagttgcatgtagaagacagtctacctatatctaactctttgttctcctgaagcatagcagacttctcttggccgtcttatgaatgaaaggagctaaagctcatcccacagaagggacttgcctcagataccaagtccagtcctgtttcctagattccatcccccccaccctgcttctaggagctttctacctaacactggcttcatgggtcccttcctacagatccagtggttctggagagcattgcgttctttcgatcaagctgaccgtgccaagttcctccagtttgtcacrggtacttccaaggtacccctgcaaggctttgctgccctcgaaggcatgaatggcattcagaagtttcagatccatcgagatgacaggtccacagatcgcctgccttcagctcacacatggtaaaaggaagggtttgtttctccttttcagtgcttaggttgagcttgcatacttgatgttttcaggaccctacccaagattgggaacacaaatgtggctgagtcctggaccttgggtaactcacaatttggtgtttctatggaggtgatgtttgagatgagatgtgctagacacagtgggggctggggagacactgtcaggtaaacagcaccacaagagagcatggtgtattccagggccagcgtgactggagcaaggaggagttgcagggagcaaaagtctaaagagctcagcagaggtccgattaccagtgactctgaaaaccaccttcaagtttgcactttagcctatgggcgagtgaggccagggtgtttaaggaggagtgacagggtcagatttttggttttggtgcctgatggccagtttgggagccagataaagggggacatactgggctgagacaagattgggagtcatcaagaagcagggagttggtttcttcagggaggggaggggctggtgggcaccatgggaacacacagatttggttatctgtcatccctcaccacaaactgatctttcttctttccttagttttaatcagctggatctgcctgcctatgagagctttgagaagctccgccacatgctactgttggctatccaggagtgctctgaaggctttgggctggcctaataaggccctgcccaactccgtggggttttttttaccattgttggacctggggaggggggagttaaaaaaagaaccagaaagaaattgtcaaaaaccaataaatgaaatccmccaactcaccgtgtgtgtcccagctgccccatcttccccagcgcatacctgttcctcttctcattctctccccgccgcctgtttcctcaccttctctcccctttccatgccgtccatgatccccaccccatgtgttttaaaaaggcagtagcctttgcagggacctgtctgtcccaactgtttgaacagtgtgctcctcagattctgtgttcagaaggatttgctgcattgagacttgaaacctttggataggggaaaaaattatatatatatatatttttttgttctgtttgcatttcttaatttgtgcttggaatgtgttgatgtgcacagctaatgattcaatgcgagacaagattggcgtctgtgttgtggaggtttcaaataaagagcactcttcataactcacttttcacaatggagtttttttcaaacttaaaaaaaaaaacaaaaaactcttaagcacatgctaggcatctggagaaaagatkgattctccaggaaaccatccctgccctacccgcttgcccacctgcctccaccactggtgcaacttcctccttcagagtcagtttctgcagtcaggagagatgagcagttcaccaggaattgggggtgggggcatctgttttttttttttagaatgggagctgcacttggggatggtgatggtgttagagattgcagcccaggacaaagcatcaccttgctcaaggggaacaaactgcagcaggttgtacaaaacattcagagagctcacttgacccaaccgagggttttacttggtgagcctttctagtagtcttgagtctggggctcagttttagatttttatttcattaatgtttgtttatttctaataaattttaataagcgagtaatttaactaggtcgccagaagaccattatttttgtttgtctatttttgttgtcgtcactccctctctcgtcatctgtctgccagtctgttcacagatcaccttgtagtcccttgtggtttttactccatccagtgcttaaagctgatctaaggacttcgatggttccagccttcaaagaaaaaataatttaataaaaatttagttagaaaaaataaccccaagtggtgcttgccttgtgtggtttttctcattttcctggggtgctacctctgaacagattgtccccttgaccttgtcccaaagtgtgggtctaggaaagaaagggtgtgtctttaacctgatcccctggtcctggagccaaggctgctagccattttccccttttttagtgttcccactcttttgtgcctggccctgctttgatgactgagaaggcagaggaattgccccatccgtgttactgagcttctagtagggaggcgaagacagtgattagttttgtgacagatgaagaaaggggtctcagtgcacatagaagtgcctgacctagcctggagagtcagggaaagctttccatcgtcggtgcacttggattgcagcctaaagctgagcaggagttgaggttaagcagagaggggtcatataattcaaggcaggaggagtttagttgcttagagtccagcaggactttaaaatggaagagatacaccaggtgcggtggctcacgcctgtaatcccagcaccttgggaggctgaggcgggtgggtcacctgagataaggagttcaagaccagcctggccaaaatggcaaaaccccgtctctactgaaaatacaaaaattagccaggcgtgctggcgtgcgcctgcagtcccagctactggcagtcctagccaccgcgccagtcccagccaggttccgtgactcacgcctgtaatcccagcactttgggaggctgaagcaggagaatcgcttgaacccgggaggcgaaggttgcagtgagctgagatcacgccattgcactccagcctgggtgaccgaatgagactcggtctcaaaaaaaaaaaaagaataagcagagagtagaatttgtcaataagcagtaagattaactggttctttgaaataaaggtctggcaggtaatttaaatttgaaagtaaagggggggttcctgggttggaggttgggggttggatgtggaagctgggagtacagatggaataatcctatgggaaatggaagcaaatctcattcagtgggatactacaaaaatagagcatgatcaagtgtgatttgcccctgggatatgtgtagtgtaatattaatcgcctcattgtcagttgagaaatctttgtccgtagatggcaaggcatttgttcacattcaagaaccattcctggcaacctttaaaggtaaagctagcttgataaggtagtttcagaccaacagccaacatcacacttgaaagataaggtggctaattatcactattagtgctgttctgctattctgcagttttctatttcagtaaaacaggaaacaaaaggtataacttaaaccatttgctaacggagtcaaaagttattggagcagggcatggtggctcatgcttggaatcccaaggctttcagaggccaaggtgggaggattgcttgagctcaggaattcaagaccagcctgggcaacatagcaagacctctctactgaaatttttttttaatctaggcatggtggcacacacctgtagtcccagctactcgggaagctgaggtgggatgatcgcttgagccccaaaaatcgaggctgcaatgagctatgatcacgccattgcactccggcctgggagacagcgagaccccgtctaaaaaaaaaaaagtattggaacttaaaacagtctagcaagaaacttggctataatgaacaaactattcacataaacttattacctaacataaatgaattgtgacaaattcctacaatggaatcctacacagtagtaaaaatatcaattgcatacatcacatgcacaatctcaatgataaagtttcaggctgggcgtggtggtgcgtgcctgtagtcccagctacttgggaagctgaggcgggagtatcacttgatcctaggagagaggtcaaggctgcagtgagctgagatcataccgctgcactctagcctgggtagcaagtgagaccctatctcaaaaaaagaaaaagtttcaggagggtacatacatataagacctgctcaaaagttgcaaaatcatgcaacatgtatgaagagtatgaaaaaccatgaggatgataaaatcttgcacaatgttgaggataagttatgggacaatgcaggggtagacagaggggatgtggctgggaagaggcacgttacacagggcttcaactacattggtgatgttttctctctttttttttttcgagtcagagtcttgctttgtcacccaggcaggagtgtggtggcgcatgatcggctcactgcaacctccacctcccaggttcaaaagattctcctgcctcagcctcccaagtagctgggacttcaggtgtgcaccaccacgcctggttaattttttaaatttttagtagagtcagagtttcttcatgttggccaggctggtcttcaactcctggcctcctgtgatctgcccacctcagcctccaaaagtgctgggattacagatgtgagccactgcacctggcctttttcttttcttttaaagtaatattttgtctttgttgagtctgagtctcaactctgttgcccaggctggagtgcagtggtgcgatcccggctcactgcaacctctaccgtcagggctcaagccatcttcccacctcagtctcccaagtagctggggctacaggcacatgccaccacgcctggctgatttttgtattttttgtagagacagggtttcaccacattggccaggctggtctcgaactcctgggctcaagtgatccacccaccttggtctcccagagtgctgggattagaagcgtgagccaccgtgctcagtgatgttttgtttcttaagctgggttgtgctgggtacgtgagtgaattttccttgtaatactatgtactgtgaaacttcataacttttatacatctgaaatgtttcataacaccctttttgagatatataatttattaaattttacaatgcatttgagataggtagcagggagatatcagtcctgttaaataaaaattataggaggccattggtttgaactaagctcctgcactaggctccaacagaccaaacaaaataaaaatggagtcacccatactaaagttccacttcaccaaacctaaactaagttattacctgaccttccaacaaatcaggagagagagataacatccaatttccccaacaagtcagtttaaatcttcaatcagcatgataataaagctccctctgctttaatccttacacaaaaaagcctgaagttacctgatgttaactacaattgacccttgaacaacgtgggggatgggggactgaccatccgtgccaatgaaagtccacgtatgactagactccccaaaaactcaaatactagccaggcacagttggctcacacctgtcatcccaacattttgggaggccaaggcaggaggatcacttgagtccaggagttcaagaccagcctgggcaatacagtgagaccatgtctctacaaaaaatataataataaaaaaaaagatggccaggcttggtggcttacccctgtaattccagtactttgggaggctgaggtgggcaaatcatttgagtccaggagttcgagaccagcctgggcaacatggtgaaaccccgtttctacaaaaaatacaaaaaaattagctgggtgtggtggtgcacacctgtagtcccagctactcaagaggctgaggtgggaggattgcttgtgcggggaggtggaggttgcagtgagccaagatcatgccactgccctccagcctgggtgacagagtgaaacaccatttaaaaaaaaaaaaaatccttaaataactaatagcctactcttgaccagaagccttactaataacataaacagtctgtattagtctgttttcacactgctataaagaattgagactgggtaatttctaaaggaaagaggtttgattgactcacagttctgcatggctggggaggccacaggatacttacaatcatggcagaaagcaaaggagaagcaaggcaccttctttgcaagatggcaggagagagcacaggggaactgccacttttaagccatcggatatcatgagaacttcctcacttcctcactatcatgataacagcatggaggaaccactcccatcatccaatcacttcctaccaggtctctccctcgacacatgggattacaattcaagatgagatttgggtggggacatggggccaaaccatatcattccacccctgacctctccaattctcatgtccttttcacatttcaaaacaaattatgccttcccaacagtcccccaaagtcttaactaattccaggattaactcaaaagtctgagtttaaagtctcatctgagacaaggaaagtcccttccacttatgagcctgtaaaatcaaaagcaagttagttacttccaagatacaatgggggtataggcattgggtaaatgttcccatttcaaatgggagaaattagccaaaacaaagggccccaggtcccatscaagtctgaaacccagtggggcagtctttaaatcttaaagctctgaaataatctcctttgactccatgtctcacatccaggcaacactgatgcaaggggtgggctcccaaggccttgggcagctcttcccttgtggctttgcagggtacagcccccacggctgctttcacaggctggcattgtgtgtctgcggcttttccaggtgcatggtgcaagctatcagaggatctaccattctgggacctggaggacagtgaccctcttctcacagctccaccaggcagtgtcccagtggggggactctgcatgggggctccaacccctcatttcccctctgcattgccctagtagaggttctccatgagggcttcacccctggatcaaacttatgcctggacatccaggtgtctctatacactctctgaaatctaggtggaggttctgaaacctcatctctcttttttcttttttttttgagactgagtgttgctctgtcacccaggttggagtgcaatggtatgatctcagctcactgcaacttttgccccccaggttcaagcaattcttgtgcctcagcctccagagtagctgggattataggcatatgccaccatgtctggctaattttttgtatttttagtagagacaaagtttcaccatgttggtcagactggtcttgaactcctgacctcaaatgatccacccgcctcagcctcccaaagtgctgggattacaggcatgagccaccacgcctggccccaaacctcaactcttgtcttctgcacacccgcaggcccaaccccacatggaggctgccaagtcttggggcttgcaccctctgaagcaaaggctggagcaataccgtggcccttttagccacagctggagctggagaggctgggatgcaggacagcaagccccgaggctgcacagagcaaggggcggggtgggggg

SEQ ID NO: 94481 - DNA, 14178 bp, Homo sapiens
cctcatcctcctgagtagctgggacaacagacacacaccaccacacccagctaatttttgtattttttgtagacatggaatcttactacgttgcccaggctggtctccaactcctgaactcaagcgatcggcctgtctcaggctccaaaagcactgagattacagacatgagcagtggccactttttttttttttgagacagtctcactctattgcccagactggagtgcagtggtacaatcatatctcactgcagcctcgacctcccaagctcaagtggtcctcctccttcagcctcccaaccatctgggaccacagacacaagccaccatgcccggctaacttttttttttttttttgagatggagtctcactctgtcacccaggctggagtgcagtggcaagatctcggctccctgcaacctctgcctcccaggttcaagtgattctcctgcctcagcctccagagtagctgggattacaggcatgcaccaccacatctggccaattttttatatttttggtagagacggggtttcaccatgttggccaggctggtctcaaactcttggagtgatcatcctgcctcagtttcccaaagtgctgggattacaggcgtgagccaccatgcctgtaattttattttttttattatttttatttttgtagagaaacataggtttccctatgtttccagggctgatctcaaaatgagatcctcctgcctcggcttcccaaagtactgggattataggagtgagccaccatgcctggtctacaacaggttcattgtcacctcagggccttttatttttttttttcttttttttgagacagagttttgctcttgttgcccaggctggagtgcaatggcacaatcttggctcaccacaacctctgcctccagggttcaagcgattctcctgcctcagcctcccaagtagctaggattacaggcatgcgccaccactcccggctaattttgtatttttagtagagatggttgttctccatgttggtcaggctggtctcgaactcctgacctcaggtgatctgcccgcctcggcctcccaaagtgctgggattacaggtgtgagccaccacgcccggcacctcagggcctttctacgtgttgttctttctgcccagatagctcttcctctcgctcattacaaagcctgcacgttctcttcctgaagatgtcagtttaagcatccactccttagagacctttccacctcttcttgtttcttgtttttttgttttaattttttgacaagagtcttgcaggctggagtgcagtggcgtgatcttggctcactgcagcgtctgcctcccaggttcaagcaattctcctgcctcagcctccccaagtagctgggactacaggcatgtgccaccacagccagctaatttttgtggtggtgttttttttttttttcccgagacggagtgttgctctgtcgcccaggctggagtgctgctctgtcgcccaggctggagtgcagtggcacaatctcggctcactgcaagctccgcctcccgggttcacgccattgtccggcctcagcctcccgagtagctgggactacaggcacccgccaccacacccggctaattttttgtatttttttgtagagacagggtttcaccgtgttagccaggatggtctcaatctcctgacctcgtgatctgcccgcctcggtctcccaaagtgctgggattacaggcgtgagccaccgcgcccagcctaatttttgtgtttttagtagagacggggtttcaacatgttggccaggctggtcttgaactcctgacctccagtgatccacccacctcagcctcccaaagtgctaggattacaggtgtgaaccactgtgcttggctcctttcacctctttcacaaaagctgccctattctccctctcagttccttccaattccttgctttgcctttctcacagtttgtgattacaatgtattgacaggttcacggcctgtcttccacctcccctcggtactgggagctccaagagggcgggtcatagcatgcagtaggtgctcaataaatttactggctgggtgtggtggctcatgcctgtataaagcactttgggaggctgagatgggaggatcccttgaggccaggactttgagaccagcctgagcaacatggtgaagccccatctctactaaaaataaaaataaaaaaaattagccaggcatggtggcacacacctgtagtcctagctactggggagactgaggtgggaggattgtttgagcccaggaggttgaggctgcagtgagccgtgattgcaccactgcactccagcagaatgggaccctatctctaaaataaataaataatataaaaataaatgcagtatgctaaatgagagtgcctgcacaagatgcagagagccaggaatggggaggtggaagacaagggccctccctcagtagctgctcaattagtgtatgatggattaatgaagctcagagtaagaccttgacccactggtcctggactcctaaagaggagtcttctggcctcatccctagcctcctggccccagatcacactgtgtgagcagcccctggagcctgcttggcaggggaggaacagaagtccctgctcagttatttgcacactggcttctcccacgaagtcctaacatcgcaacttcaagtgccctttcctttcagaccccaggcctggaaaggtctttattttggccacctcagcccattgcatggaagggatatccaaggtcagaagcaatcccgtccctgtgtccaggttgagcatgtccctcctctgctcacacaccctccgtggctccctattaccctcaggagaaagtccagctcctcagctcagcagtcacagtccagcctgagtgtggcaagatcatttttcctttgtctaattctcagtcactctttgggtctcatcttggttatgtttcccagtattgaccattgacacagtcccaggacacactaactgctgtcagaaaccaaatgttcattgcattaatcttgtcagaacatcaggctgaatacgacttttattgttgttgttaagagactgtgtctggctctttcacccaggctggagtacagtggtgcaatcatggttcactgcagcctcaacctccgggctcaagcgatcctcccaccttagcctcccgagtagctgggactacgcacactaccacactcagctaatttatttattttttatagagatgaggtctcactctgtcgcccaagttggagtgcagtggtacagtcatggctcacgcagcctcgacctctgggctcatgcgatcctcctacctcagtctcctgagtagctgggactacaggcacacagcaccacacctggctaagtttttttttttttaattttttgtagagacaggtctcaccatgttgaccagcctggtctcgaactcctggactcaaacgattcctccccactctgcctcccaacgtgttggattacaggcatgagccgccacgcccattaggatatgactttttttgtttgttgttttgttttttgagacggagtttcgctcttgttgcccaggctggagtgcaatggcacgatctcagctcactgcaacctccgcctcctgggttcaagtgattctcctgtctcagcctccctagtagctgggattacaggcatgtgccaccacacccatctaattttgtatttatttttaatagagatggggtttctccatgttgatcaggctggtctcaaagtcccgaccttggcctcccaaagtgctgggattacaggcgtgagccaccatgcccggtctaggatatgacttttacagagtaaaaagactcacagtttgcattgcatgtgaccactgtggaccattgactattaacagagtattaaattcaatataaagaacagtgactgcccaagagcttagatcaggaataggcaaacattttctataaagggccagataggaaatatttgaagctttgccggctacacagtctcttttgcaattactctacgctgcggctgtttgaaagcattcatatacacaaataagtgagcatggctgtatcccaggaaaactttgttcatggacactcaagtgtgaatttcatgtaattttcacatgtcatcaaatagtcttcctctggtagtttttcagtcattttaaaatgtaggccaggtatggtggttcttgcctgtaatcccagtgcttggggaagctgaagtgagaggaccgtttgaggccaggagttcaagaccagcctgggcaacatagggagaccccctcctccatccttacaaaaagttttaaaaattagctgggatgcctgtagtctcagctattcagtaggctgaggtgggaggatcacttaagcctgggagttcgaagctgcagtgagctatgatcctgccactgcattctagcttgggtgactgagagagatcttgtctctaaaaaaaaggagggagccagggccggtcatggagaccatcctggccaacatggtgaaaccctgtctccactgaaaatacaagaaagaaagtaaaaaaaaaaaaaaacccaaactagctgggcgtggtggcaggcgcctataatcccagctactcgggagggtgaggcaggagaatcgcttgaacccaggaggtggaggttgcagtgaaccgagatgaaggcactgcattccagcctgggggataagagtgaaacccatctcaaaaaaaaaaaaaaaaaaaggagccaggagcggtggctcacacctataatcccagcagcactttgggaggctggggcaggcggatcacttgagaccaggagttctagaccagcctggccaacatggtgaaaccctgtctctactaaaaatacagtaattatctgggtgtggtcccagctactcgggaggctgaggtgggagattagcttgaacctgggaggcagaggttgcagtgagccgagattacgctgctgcattccagcctgggcgacagagtgagactctgtctcaaaaaaaaaaaaaaaaaaaaaaacggaaaaaaaattgaatactgttttggggtcatggttaaagctgaagtttaccaacccctgatgggtcataagtgtcatgatttgtgtttacagagtatcagaactttgtttaaagttaccagctgataaaatatgaggacaggtttatggctaacagggtttcatcattgacagatagcaagtatcaggattagtcttttttcacaaagtatcagaacacagcaagctctgatggctaatcaggtgtcagaacctgggtttaagtccaaccctgccttggggcccacggcaccgcggtaaccaccaactactgtccactctcaggatactgtttactaagtatcgagtgacaggctgatggcaaagtatcgggtcatggatgtcacactgtgagttgggcactgtgacagcgtctctagatgccagctgtttacagtgacaggagactggctgtttacaggggatgagtcagccccacttccagatacccaagtccagatggcgggtaggattggcacctctccaggtgtttacagggtactgaggtcctggcaagctgggcttctctcctgcggccacctctagccagggtggggaatgagtcccctgaaggctgtgggacccatgatcctggttagattctccttctgcttgtccctggctgtgctgcctcaggcacattacttaacctttctgggcctctgccacctcatctgtaaaatgggcatgatgatgaagccaggttgccagataaaatataggctactcagctaaatgtgaagttcagatcaatattgaatttggttttactgtaagtatatcccatgcaacatttgggatatacttatactaaaaaaaaattattcattgatgctatggtttgaatggtcccccaaagttcatatgtttgaaacttaatcctcaaagcagtcctttcaaccttgtcaacctgtyggcgcggcctctggtgcagtggcggcggctcctgttcctgccgcagctctctccccttcttacctccccaccagatcccggagatcgcccgccatggctttacttactgcggccgcccggctcttgggaaccaagaatgcatcttgtcttgttcttgcagcccagcatgccagtgcttcctccatgaatttgaaagacatattggctgacctcatacytaaggagcaggccagaattaagaccttcaggcagcaacatggcaagaaggtggtgggccaaatcactgtggacatgatgtatggtggcatgagaggcatgaagggattggtctatgaaacatcagttcttgatcctgatgagggcatccgtttctgaggctttagtatccctgaatgccagaaactgctacccaaggctaagggtggggaagaacccctgcctgagggcttattttggctgctggtaactggatgtatcccaacagaggaacaggtatcttggctctcaaaagagtgggcaaagagggcagctctgccttcccatgtggtcaccatgctggacaactttcccaccaatctacaccccatgtctcagctcagtgcagcygttacagccctcaacagtgaaagtaactttgcccaagcatatgcayggggtatcagccgaaccaagtactgggagttgatttatgaagactctgtggatctaatcacaaagctaccttgtgtcrcagcaaagatctaccgaaatctctatggagaaggcagtggtattggggccattgactctaacctggactggtctcacagtttcaccaacatgttaggctatactgatcatcagttccctgagctcatgcacctgtacctcactatccacagtgaccatgagggcggcaatgtaagtgcccataccagccacttggtgggcagtggcytttcagacccttacctgtcctttgcagcagccatgaacgggctggcagggcctctccatggactggcaaatcaggaagtgcttgtctggctaacacagctgcagaaggaagttggcaaagatgtgtcagatgagaagttaygagactacatctggaacacactcaactcaggacgggctgttccaggctatggccatgcagtactaaggaagactgatccacgatatacctgtcagcgagagtttgctctgaaacacctgcctaatgaccccatgtttaagttggttgctcagctatgcaagattgtgcccaatgtcctcttagagcagggtaaggccaagaatccttggcccaatgtagatgctcacagtggggtgctgctccagtattatggcatgayggagatgaattactacacrgtcctgtttggggtgtcacgagcattgggtgtactggcacagctcatctggagccgagccttaggcttccctctagaaaggcccaagtccatgagcacagagggtctgatgaagtttgtggactctaagtcagggtaaaactggagactgggggaaagtgactaccagaaagtgaggaagcctaaataaaaagtatacttttgtttcagggggcctttaaagacttaagattaaattatatctgaggcactgataatatgtttgaggttaaaatataaattaagactttaaaagatgaaaaatggtcccttcttccctaatcagctccyttcccctgcctggtatgagttgcccatcayaggcatggtcctggaggatgaccaggactaatgcatgtggtatgagtaggtttggccccctcactatctctagagtgagaatctggctcctgtttccatggstcaaagccggttgcagagaatctgyagtcacttyggagctttagcttcttctctgccaagccctcaataagccagcaaaccaggactctgccccttctgtttccataggaatcatgttggatagtcagctgtaccaagccccttggccttcccatgcacacaaacacctcctagcaagacctgttggttagctggacatgctttggcaatttttttatactgccaagtgaccataaaggcatggcatttgttgtgactggcacccaatgtttgattttttttttaaactatccaattaaaattaaggtctgggagtgttctgtttcccattactttaatactcacccccctcccagactttctacacctgtttcacctcaggctgaggatgttctggacctccccctcttagtccctactagagacctctcaacagatctgtgggcccagtcattgggttttatcagtgcttaatgtgaactaagttttttacttccaacagaatacaagccactaccttctgacctccccaccccccaccaacccccagcttttaatatgctgtggggcatagaacagggactccggaatgaccagcatgatattttcagagtcttgtccctggggtattagcacctctttttgaacagagaattgattcaagattggacatggtctcctctgattatcaggtactggggctgagggcattaaaaatagtaagcctccttcctcgtcccctgcctcaagaaattgcctccttatttatcaacatctttttcctccctttccctgagagctcacagtacaatgtttgtttcagaagccccatttgcacaggttttcagcaactcagaatgctctacttctttttctttgagaaaggattgagatacgctcctgctgtgcccccatctttcctccaaactcctgcctgtgtttgtgtggatacccagtcccagaaccacactgttgagttggacacactgtaaacccctggctaactgtcaagtcatgatgcagacttcaggttgttctgtataaaatgcaaaataaatgttttaattaacaatgaaaaaaaaaatcctcaaagcaatagtgttgagaggtgggacctttaagaggtgattcgatcactggagtgggttcgtcattgtgggaatggatttgttataaaagtgagattggaggccaggcatggtggctcacacctgtaatcccagcactttgagaggctgaggtgggtggatcacttgaggtcaggaggttgagaccagcttggccaacatggtgaaaccctgtctctactaaaaatacaaaaatgagctgggcgcggtggcggacgcctgtaatcccagctacctgggaagctgaggcaggagaattgcttgagcctaggaggcagaggttgtagtgaaccaagatcgcgccattgcactccagcctggggtacagagtgagactctgtctcaaaaaaaaaaaaaaaaaaaaaaaaaaaaagtgagcttggaggccgggcacagtggctcatgtctgtaatcccagcactttgggaggccaaggcaagcagatcacctgaggtcaggagttcaagaccagcctggccaacatagtgaaagcccgcctctactaaaaaaaaaaaaaaaaaaaattacccaggcatggtggcacatgcctttaatcctagttactcaggaggctgaggcaggagaattgtctgagccagggaggcggaggttgcaatgagccgagatcgtgccactgcactccagcctgggtgacaggacgagactccgtctcaaaaaaaaaaaaagaaaagtgagattgggctggacacagtggctcacactagtaaccccagcgcaaggcaggaggatccttgagcccaggggtttgagaacagcctgggcaacatagtgagactccgtctctacaaaaaatttaaaaattagctcagtgtggtggtatgcacctgtagtcccagctactcaggaggctgatgcgggaggatcgcttgagcctaggagttcaaggctgcagtgagttatgattgcaccactgcaccccagcctgagagacagagcaagaccctgtctctgttttagagacaaatacatgtctctaatatatatataatatatgaaaatatatatcatatatatagatacatacatgaatatatagtatatatttatagtatatctatgtatagtgagaccccatctctacaaaaaagaacaaaattagctgggtgtggttgtgtgggcctatggtcccagctactcaagaggctgaggcgggaggattgcttgagcccaggaggaagtcaaggctgcagtgagccaagattgcaccactgcactccagcctgggcaacaagagtaataacctgtctttaaatttttttaatgtaaaaataaataaaaatttaaaagaaaaggctggccaggtgccatggctcacgcctgtaatcccagcactttggaaggccaaggcgggtggatcgcgaggtcaggagatcgagaccatcctggttaacacggtgaaaccctgtctctagtaaaaatacaaaaaattagctgagcatggtggcatgtgcctgtaatcccagctactcgggaggctgaggcaagagagtagcttgaacccaggaggcggaggttgcagtgagccaagatcataccactgcactcctgggtgacagagcaagactctgtctgaaaaaaaaggcaaggcaaggcagggagggcagggcagggcagggcagggcagggcaaggcagggcaaggcagggcaaggcagggctgtttggggcttcccttgctctctggcgtgtttctcttaccagatgatgcctgcaccacgtgataacacagcaaggagaccctcgccggatatggcccaatcttggacttcccagcctccagaaccacaagccaaataaacttcaattgtttatagattacccagcctgtggtattctgttaccacaaagcagaaagctaagacagttgtttctctgaaatttgaagttaacggggtgcctggatgtgtatttgctaaacctgatccccctgtgatgaagcctcccacatcacaaaaaaaatcttagaaatttaaaacttagccaggtatggtggtgcacacctatagtcccaaactcaggaggctgaggcaggagaatcccttgagcacagaaggtcaaggctgcagtgagccatgatcgcaccactgcattccagcctgagtgacagaacaagaccttgtctctgtcttttttttttttttcagacagaatcttgttctgtcgcccaggctggagtgcagtggtgcgatctcggctgattgcaacctctgcttcctgggttcaaatgattctcctgcctcagcttcccgagtggctgggattataggcgtgtgccaccatacctggctaatttttgtatttttagtagagacagggtttcaccatgttgagcaggctggtcttgaactcctggcctcgagtgatcagcccgcctcagcctcccaaagtgctggggtgacaggcgtgagccactgcgtctggccttcacctttctcttttatccttacttttatttttttttagaccggatcttgctctgtcgcccaggctggagtgcagtggtgcgatcgcagctcactgcaacctggacttcccaggtgcaagtgatcctcctgcctcagcctctcgagtagctgggactataggtgcatgtcaccgtgcaaggctaaaactttttttttaaagagatgggatcttgccatgttgcccaggctggtctcaaactcctgggctcaagcgatcctcctgcctcggcttcccaaagtgttgagattacaagtgcgagccaatgcgcctggccttatcgttgcttttgaggtgagaagatggaggtccagcatccagggccagatttgagcccactgggtcctttgtctctagccttagtagcactggccatgaaatgggactttagccaactgcaggtgaccaagagccaaccttgcatctcaggctgctgggcccctctgagctcagccccgggggcttgttgcaggaaggcccctcacttttatttatccccccacccccactgtatatgtaactgtctgaaactcactgttaaccccataaggaaaaatgtgctggctgggcaccatggcttatgcctgtaatcccagcactttgagaggccgaggtgggaggatcacttgaggtcaggagttcgagaccagcctgggcaacatggtgaaaccccgtctctactgaaaataccaaaatcagccgtacatggtggcatgtgcctgtaatcccagtgtctcaggaggctcaggcaggagaatcgcttgaacccgggaggcaggggttgcagtgagccgcgatcacacgactgcactccagcctgggtgacagagtgagaccccgtctcaaaaaaaacaaaactcattcaactgtactttattggatataagttacaccttaatacacttgactcaaaatttatgtatttaatattttattttgagaatgtgagaaaaaaaaaagtaacgtaagaataaaatccaggccaggagtggtggttcacacctgtaatcccagcactttgggaggtggaaggatcacttgagcccaggagtttgagaccagcctgggcaatgtagggagaccccccatctctacaaaaaaaaattttttttaattaaccaggtgtggcggtggacactcagaatgttacagaatggttcttgtgactaggcctttagtcacagctacctgagaggctgagatggaaggatcacttgagcccagaaagctgagcctgcagtgagccgtgatggtgccactgccctccagcctgggcaacggagtgagaccgtctcaagaaaaaaaaaaaaaagaaggccaggcgtggtggctcacgcctgtaatcccagcactttgggaggccgaggcaggtggatcacctaaggtcaggagtttgagaccagcctggccatcatggtgaaaccccatctctactaaaaatacaaaaattagccggacatggtggtgggcgcctgtcctaccagctacttgggaggctgaggcaggagaatcgcttgaacccaggaggtggaggttgcagtgagccgagatcacgccattgcactccagcctgggtgacagagcgaaactctgtctcaaaaaaaaaaaaagaagaaaaagaaaaagaaaaagaaaaaaaaattcaaatgctttatacaaagtcttctgttttggaaaactcgtgttattagttccagctctggaatgatgaagagtggtctcttgctacataccctagctatccagatgtgtctgttcatgttctttttcttgcttcaaaataaaacacatctgtgttttaagttacaagtatcaacttgctatattcaaagaattcatgaaacatatgtgagcataccattaaagaaacacagaaaaaaaggagaaagcagtcaatttatttatttattatggagacagggtctcagtctgtcacccaggctggagggcagcggtgcaatcatgactcactgcagcctcgacttcctgtcctcaagcgatcctcccgccttagcctcccaaagtgctgggattacaggaatgagccaccacacccagccttaaagcagtcagtttagaagtggagatagtatgggttacagccatactgaatcaggcaccatggctccggttccatgcgtaatagccctggaactatcaatctggataaaacagtcctttttatttattttttttggtagagatgggatcttgctatgttgcccaggctggtcttttttttttttttttgagatggagtctcgctctgtcgcccaggctggagtgcagtggcatgatctcagctcactgcaagctccgcctcccaggttcacgccattctcctgcctcagccgccccagcagctgggactacaggtgcccaccaccacgcctggctaattttttgtatttttagtagagacggggttttaccatggtctcgatctcctgaccttgtgatccgcccgcctcagcctcccaaagtgctgggattacaagcatgagccaccacgcctggcctgcccaggctggtcttgaactcatgggctcatgcaatcctcctgcctcagcctcccaaagagctgggattacaggtgtgagccatggtgcccatcagtctgagacatacagatgcgtgcctcagtttcctcacctgtacaatgaggttcatcacccccttgcacatggggtcattgtgaggacagggtgggttgggcctggtgcagtgg

SEQ ID NO: 94482 - DNA, 27915 bp, Homo sapiens
gggatcaggtggggtgaggggatacctgggaggtgaccccaggaagctcctggtagggaatgggacatgagacaggaagggaaggagccctacagggggcaccaactgccaacagacatgacacatgtggatgagtggcgctcagccccgcctgggacagctgggggacagtgtagatgctcatctcagaggggtcccactcaggggcgaggagcgtggggtgttttggtttgggttttttttttttttttttttagacggagttttggtcttattgtggacgtgggggagggacgacgaacgtgagggtgggaggttgtaggttcagcagaggctcctcggccaggagtgcaatggcacaatctcagctcacggcaacctccgcttcctgggttcaagagattgtcctgcctcagcctcctgaatagctgggattacatacaggcacgcgccaccacgcctggctaattttttgtaattttagtagaaatggggtttcaccatgttggccaggatggtctcaaactcctgacctcaggtgatccactcgccttggcctcccaaagtgctgggattacaggcgtgacccaccacacccagccctgtggggtgtttatccacccccaacctcattttgatttcccagaaaacagacccaagatggcacactgagaatgtggggcacatgggtatccggccatgggagctggggaagggccctgcagggggtgcccaggagcaggggaggtcgtgggaaatgaagctcagtcctgtcggagaccttagggagactggcatgtccttagacggggcattcccagggcaggcacggtggtggctcacacctgtaatcgcagcactttgggaggccaaggcgggcagatcgcctgaagtcgggagttcaagaccagcctggccagcatggtgaaaccccgtctctactaaaaatacaaaaattagccaggtgtggtggcaggcacctgtaatcccagctactcaggaagctgaggcaggagaattgcttgaacctgggaggcggaggttgcagtgagccgagattgtgccactgcactccagcctgggcaacagtgcaagactccatctcaaaaaaacaaacaaacaaaaaaaacggcattccctcggccagagaaagctacaggtgaggagtagcagaagctggcggtggggagtgcagccacgtggttaggcccaggatgggctgcagccagcgtgcacccagagctaccagcagctattacagaccctcctcctagacctgggatttctaagagacacctcgagtctcccagaccagacagggtactggaagcactctgatgggtggggtattgcctctgggtcgctcacatgacgtccttggttcctttacgagcctcagtttccccatctgtaacatggggagaagaaatgatggctgggcttgttagtgcatgcatttggtcccagctacttgggaagctgaggtgggaggatcacttaaacccggaggttgaggctgcagtgagctatgattgtgccgctgcactccagcctgggtgacagagtgagacacccatatctaaaaagaaaaactagagatgctgccaccttctttggtctggaaggaggacattaccagaggatggaagccagttcccaagggttagtatgactctggagttcaagtgcagggcagaggggtggggcttcgatgtgtggccggtgaaagccacacaaggtgctagaagcacagaagtgtaccggctttggttaagctttgtggaggacggacgtgggggtgtgagttgcaggtttggcagaggcttcttggccaggccctcctgtatcccttctgtcacccggagtccctcgcagccctgtgggattggtggcatgacccagtggcttggaggggtcactgaagttcagctgtttcccggtcaaggccacacagtgagccagggcacagctaggttcaatcccaggcccagagcctctatctgtgagtttccgcctccaggcaactagtcttggggtataatccccatttcagaaaccctagctggctgtccaaggagtgaggctgtctgaacacccctctgcccatgctggccacccccagccttcctgagtcaaaggcccagctcctcccacccctcaccctcgacctaccctcgtgttcaccagctgctgtggctgctcccaccctggtgttgtttgggttttaatttttgtgttgcatttagaaaattacccataattacagcttctgagaggaaacggtctcctagcgcagacccggctcccagctgtggccgcctcccacgcacgcacggctggggaggggttgcagggggcgccagccccagtcctggcccctcccagggccccccactttaatgaggaggagggagggaggccgtttccgccacctatggagaagaaaaaccaccagcaggaaaacccaacccggcctcctctgcaggaatggggagtactcgtgggcccccccactgctgtgtcctcaaggagacaggacccagaggaaggcggaggcggccaactgaggacgggatgcgttatttcatccgaatactgccaagtccaactagggactgtgcggaaacagtcttgcgggggcagtgcccagggaaggcttggaggaggaggaggaagaggaggagggagaggaagaggaagaggaggagttggcctcctcccccaggaggaccaaggaggaacccttggccaaaggaggagcctcagtaggccaggccagaagccagagaaaaagcgttccaggcggcaggaaccgctagcgcaaaggcttatgggtgggactgtgcagggtggatccagggtgagggtacagtcggccccttctcctggcaacctccctgccctaaaagaagattctccttagggctcctccaggcacagcccctgacccgtatttaggggacatccatggtgggtgactcaccactgtccaccccaagaagcagagacccagccgaggacctgccctgggccccttccccggggcaacctccccgccccctctgtgccaccttgatctcactggcaacggagcttcttaggtttttttagtttttgttgttgttattttgagacggagtctcactctatgcccaggctggagcgcaatcttggctcactgcaaccttcgcctcccgggttcaagcgattctcctgcctcagcctcctgagtagctgggattacagacgcccgccactacacccagctaatttttgtgttttgagtagagagggggtttcaccatgttgtttaggctggtctcgaactcctgacctgaggtgattcgcccgcctcagcctcccaaagtgctgggattacaggcatgagccaccgcgcccggccggtttttttagtttttagtaagagtcttggtctgtcgtccaggctgaagtgcagtggcacgatcacagctaactgcagccttcacctgctgggttcaagccatcatcctgtctcggcctccgaagtgctggggctacaggcacacgctgccaccacgtgcggcctcccatggagcttcttaaaatcgtgacgtagatcccatcctctcctcgcggctccacaccctcccattgctccctaatgctcttagaaaaaaatctcaccccctcccctctgggcgtggtctagctctctgccttccctgccatcatccccctcttcttcaccctgccccggccacggctgcttcctggctctgcctccagcgccttcgccgtgtgcccacctcagggccttggcccttactgtgactacagtctgaacattccacttccaggtctttcaaatccacccctcctctccccgttattaataatttttcctccccgccctgcccgtccttcgcgtgggtggggggtccctttctgcgggttctgcccccgcaaggcgtgcgccctggttgggagtgcgcgcggctcagctccccgacgccgcgtgggacccagggcccgctgccctcgcacttttccgccagcgcccaggctgtgtttggagatccttcccggttgccatgagaaccgcgctcctcgctcccgccctccgcgcctcccccatcacagctctctgggccgccggcgcctcagcctccctccctccttccctccctccctccgcctccgccctcccccgggagaccgaccgaccccgccgtcgcccgtcctgtcaccaggggtcccctccctctcacgcacgtggcactccctgaaattaaccgactgactcgccagcttttgactgtccgcctcccccatcagattctgagctccaagaggtagcaacgtgtcccggctgggtctccggagcccagcacacagtaggcgctcaatacatgtttaatggggtgaagactcacattgacccaaggaaccgtggctcacagggggcgagggaccaaccagggcacacagggccctggggagccacggagctttaggagattaaactgggggtggcaggaggggcatctgccgggcccgggagtgccggttgtcaccaaggctctgtgtgactttgggtgagccacaccctctctgtgcctcattaggagtaggcgctggcgggggcagtggtgggagcggtcattaggatgggagtgacctggacgccgaagcccacgccccccgtggtcccccaggctccggggccgtcgccagcccgaggccctgcggaattgtgcgggcccctcctaccccgccgagccggggcccggaggcccgcgggagaggaagctgggggaaggggcggccggctggacaggaagtgggaagggctggcgtcccccctcccgcgccgaggcccctcggggaggaggcggggctggggccggtcctgcccttcccttcctctccgcgggtctggagccccggcggctcccgacttcccgccggccagaaggcttggggtgggggcggggggttctcacgtactggggggcggcctctatcggggaggcatctgcggggtcagctggcagcgagagacatccagacattcacacacaaacacacacacgaaacgtgagcacagagccacacacaggtcctagggagctggcggcccacccacgcgcggagacacacacgtgcacattcggcacacacttgtgcacgcaacctcactgagcgactcggcccgactcggacccacaactgccaccgcgcagccagggacagtcgccgagacagcgataatttattgggtgtttgcccgccccccacgcacaaggatgcacacgtgcactcacacgggagccgcgtgtttgcacacacgcgggcttgcctaggaaaaaagaggaatagccgtggcaaacacagaaacatctagacccagagtcaaccgcaccgccttcccctaccctgcccatccacacacgacccactggtacccgggcatccctgccctgcgggggtccctgactcagtatccgcccccaccctctctgaacacccctggtggggggatgaagggccctaaaaggggaaaagggcacccactgcctgcaccctgactcccgcagacaaaggtgggatgcgccccatttacagctcacagcaccgaggctgagaagcccaaacagcagtcacccagcacctagtattgtcaccgggtgttacttcggggtggtgccaggtggctcccacagcctgggtactataggagctttgtgtctgtgtgcctgggttgtgtctgtgttgtgtgacttcgggcgggacgctgagtgtccgcaggccctgtgactgtggagctgggtagggtgtggttctgaggaggccgcgatagtgcgccccagggtgactgtgagttaactccgtgggctctgtccacggctgttggaagctgtggcacggccttgcataagcgcgcgcctgcgtgaggctgggtgcctgtgtgcggtggcctgtgtttagttgttccaggacggccactgtgagctgggtgtgtggcagtgtatgtgtgtcgctgggcgggctgtatgtgcggtggttcccacccttgctgagtgtgggtagctctgcggggtgagacacccaatgtcactgcctgaggctttatggggctatccgcagtcgttccagcagcggggtacacttttgctgtgtggagcgctatgttgagtgtcgctgcgaatgtgtgtggctgggtgtacaacaatgtgggtggccggctccatttgaggtgagtgaacgtgtgtgtgcacgcgcgcgtgtgcagccgcgatcagctgtgcgtccctgggtggccgtccgggatcctgacccgcgagtgtgtagccgcgcccccaccccccgcggcgggcactgcgcgtgcgcgctccggcggcgggacccacccgcgcgcccgccatcgcccctttaagagctgcgcccgcgggcggcgtagaggcagcgggcgggggcgcgcgcggcgggaggaggggagcgcgcgtttcccggaacagcccgcgcggaggaaagggaggaaaaaaagccaccctgcggccggggccggagctggagccgccgctgccgccgccgccgcggccgtctggagctcccccgcgcggacgatgcctgccgtgcccgcctggggctcggggcggtgaggcccggggcgcggggtagctatggcgacggcaagcgcggcccgcggcgccgcctgacaggtgtgggccccggcggcggcggcgtggagcagcatgtacgccaaggggggcaagggttcggccgtgccctccgacagccaggcccgcgagaagtgagtgcggggccgggggcggggctcggcgtccgcgctcttccgtgggctccggcgcgggcgggcaccgcgcggggcacgtgggcgcgggcggcggggagcgcgagcctgagcgcgctcgaggggtcgcgagattggcgggggcgcgcgacccccgaggggcacgagattggcggggggcgcgcgagaccctgaggggtcgccggagttgagggttggcgggcgacccgaggggcgctagacgggagtggacgggcgagaccggagcggctccaggggtcgcgagattggcgggggcgcgcgaaacccgagggcgcgagatttgagggggcgcgcgagatccccgagcgggtctcgggggtcgcgaggcctcctcgagacgtgggtgcgcgaggctgcggacgcatggggatcgaggtcagcgaagttttccgggacgaacaagagtgtcggctcggggaccccagtcgcctggggtagagctggagagcggctggaggggcgcgccgccacctgtctgccctggccccagcagctgtgtggggcccctggggaagccgcacggttcacagtccaggggcgggtggggacgacggagccgctctcttgataccactgaagagtgcatactgagggccccttttgttctgggcgtggctccaggccgtgggtaccaggcgctctgaagctggtaggggcaggttccaccgtgcggatggaggaagggtcgtggtggggctgaggtctctcggggtggggagtcagccgagtgtgctctccgggtggaaagcatttgaaaggtgcttggagcagtgaccgtcccgcaggaagggcacggggcagtttgcagtgttgttaaaagtgcccagaggccgggcgcggtggctcacgcctgtaatcccagcactttgggaggccgaggcggtcggatcacgaggccaagagatcgagacaatcctggccaacatggtgaaaccccgtctctactaaaaatacaaaaattagctgggcgtgggcgcctgtagtcccaactactcgggaggctgaggcaggagaatcccttgaacccgtggcgcagaggttgcagtgagccgagatcacgccactgcactccagcctggcgacagagccagattccatctcaaaaaaaaaaaacaaaaaacaaaaaaacagtgcccaggaggaggggagtcttgtcatagctgatgggggacttccaggatccttgaagttgagccacctggagtggcccgtggtgtggaactggccacccaagcagagaggaggctgggtcagcagggaggggtcccatgaggacctgccttgagggccaggccaggagtgaggacttgaatgtctgggtgctggagaggagccctggacgttggctgagtgtcccccatcctgcctcttctgcctaggctgacttgggatgccccacccctccacaaagatgcctgtcccctctgcccagcctctgggtcattttggagaagaggctcttctggctagaaggtggtaggcaaatgactgcactgtcaggcctcccttgcctgtgtgcagttaggaagatgagctccatttccaagcacccttaagcccaaagactttttgaaactggcctctggctcctgctcaggtcggaagcaggaggtgtctgccatggtcacccctggacccctggtctgtctcctgtgtgtctccaggcagctgctggctctggaggcatccacccacccagtgggaatcgggatcgttcactgattcagcatatctgccctgggtgtccctgggtgtggcagtcgggaaggcaggctccggtcgggatggcagggtcggtggccctgaagaagcccccaccccagcagggaggcaggtatccagttagcaggagaaagcaaagtggatgatagatagcgaagggtgaggggatgtcaggtggagggcacagcaagtgcaaaggccctgatatgggaccaggaaaaggagctggggctgggcccaggtggaggaagaggcagcctgcaagagtgccagatgggccccagtgggttgtgtgtgcagaagtgcgctctggctcccaggtggagtggggcttataggggtcaggaacagaggctgggaggccctggggatgtggacacagttgtctgaaagagagctggggaggccgggcgtggtggctcacgcctataatcatcctagcactttgggaggccaaggtgggtggatcatttgaggtcaggagttcgagaccagcctggccaacatgatgaaaccctgtctctactaaaaatacaaaaattagccgggcatggtggcgggtgcctgtaatcccagctactctggaggctgaggtgaaaggatcgcttgaacctaggaggtagaggttgcagtgagctgagatcgtgccactgccctccagcctgggtgacagggcgagactccatctcaaaaagaacaaaaaagaaaaacagtgaaagagagctggtggcagcctggacccaagtaagaaggaagagatttcataggtttgagccgggggtggtagggtgagggggttagctgcattcctggcccccttcccatactgtcctcccactccccaacctgcccagcagaggtgctttggggacactggcctcgggactcaaggctctcggaagtccctcagctgccagtggggaggctgcagggcccatctttggtcagagccagcctgcatgcttccatttcacggagagggtctcgtataagtgttggtttggaggtgaggttcctctatgaaagaaagcctggaaaacgccagatggccgcatgcacccatttcaacgaaagggacaccagggccctggagaggaagccacctgatgagaactcagcttctctggcacagatgagctctcagaggcagccccaggcctcagtttcctcatgtgaaatgtggacgacccatctttcaggatctttgcaaggactgggtgggagcccgtaggcagagcacctgccggggcagccacgcggctctcaggaagtatctgcctcgggcaagccacttcctgcctctgggcctcggtttccttctctgtgaaatggggtgaagaggttacactgctccaaaccttgactctccagcactgcacttttcttcctgcaatgagcctcatgcctcctaaaaatgaggcgctgcatatccttccttctctctctggccccaatcctgagccccttctggctgcccttggagcctacaggccttcccggcttacactaggtctcggccagctggctccagaaagggaccgagcacctggtgggtgcctgccctcgggggctcgcagcagatggcagtgactgtggagtgcaggggcagcagagtgggctgagggaggctggggtctgagtgggccacttgcaagaagaggggcatgtgtatatccttcagcactcaagtgttgccaggcaggttgagaagaggtccatgaatcacagccatggttggtgttgcctggcagctcgtgggtttctcccgggcttgattttgagccggcacatggatgtcggtggcttgttcatcagcctggcaggtaagccagggatgggattcacgattggacgtggtcattttggcccctggctggaaatggctatgaggggcaggtgtggagggtagtaaggagaggccgccactttgccaagaagctgccagaggcctggcctttagggttggcagaggggagggaggacggcgagggttggagggtcaggagtgagacctggtgacggatggcaaggtgacacaaagccatgagtggcaggtgtctcctgccccagcagcatctgtgtctaggaaggcgctgagcagggagcatccattgcagccattctgggtaattatggtaactcgcgtcattacggtggtagctgtggtacatttcaggccaccaggcgctagcaccccatcctggctctgcttccctgcacagcctcatgctcgctccaggtccaggcgccccatgtcctccgagtcttgtgttccttctgcagggagagctgcctgctgctcttccgggtgcctccctgttttcctttctggccacctgcctgtgtgacacagggagccctcataggtgacaggccctgagaggttgtaccggcccagggcaggtggccggtggggggcagagggcatgggtgatttgcatccagagcccttccctataactgagctcagggccccaaccggtggcgcccccagacctggcccccggagcagtcctctgggaggggaggaccttgtaggtcccaaaactccctggccgaacagccaggcttcaaaacttttcacccaaaacaataacaacccacagttcttccctggagactgaatcctgtttaaaataaaaggaccaatgtggaagggaaatcagcaaaaccgaaaacttcctttggcctcccatcgctcccaggataaactcccaaatcctcagtatggacagaatagctgctgaccttcatcagtacttaccccatggttcgcctaatcctcccggcatcccaggagggggtccccgggccggtttgttcattcactggggtgactggggcccaggatgcccagctccattctaaggtcgttgcagtgagcagactccaagtccccgccccacgtcaagctacattccattgggggcccaagacagagactctcagatggaggagacggagcagggtgggggcttccatgtgacagtgaagccccgagaggtgacactggagtctctgggtggaagtgccccaggcagggaaacagtgcgcagaggccctggggtgacagggcagccagtgtgtgggtcggggcggggggcggcacaggagggtttgaacaaggaacatgggggtggggggagcagcacctggaggggactctgtcgtaatccaggtgggagacggtgggtggcctggcccaggtgtgcagtggaggtggggagaggggcccaagtcaggaaagagatttccttcggtgtttttttaaacgcagtgatgtttggggacagctgggtggatctcacacaggtgcacgcctgtgcgcacgccaccagaggctccttggacaggatgcatgtgtaaaggccaagctgacagtctctgagcagggagggggagaatggggaaggggtgggggctcagggtgtcgaggctgggcctctagatgtcaagtgaacagggaatcccaagtttggggaaggtcaggccatagcaccctctggacagcccctacttgaaggcatcatcaaaacaggacgggcggccacacagggagagcagaggagaagacagagctggtagccgggggcgggggctggaggcaggaggacagcaggagggggcggagagggcggggtgggctctagggggccacctcctgggttaggcacttatggggacagtcgaggaacaggagacaaggaaggcaggtagaacccttcgcagccccctccttcaggagtccccctgggccttttggacagccgtgccctgggtgtggggtacccagaatgcagcctcagcaggacctcccgctgcccccgccctcccggggccgctcaccagcgttcctgcaactctgtcttaccccactctggcctttcatgccccctgctctgacccctaagtggctggggtgggaactctcttccacacctggcaggtgggttggcactgggctccccaggctagtcggtctgcccctggaacctgctcaccctggccttgtgtgctccccttccactgatggacgcaggcctgtcagccactagccacagggaaaagctcagaagcctctagatgggccagggtgccacagaagtgagctagacaggtgggcctgcaggccgcsgggccaggaaagtggaggaagagcaggtgtgggagactggaggggtggaggtcaggatctagcagggcctgggctgggggcagtctcttcaagagtgctgtgatgatgcaggggtgaccattgggcgctgtgtgtcctgccccatccctgcccctggggtggccttcacagctcatgtggtgcagtgtgagcctggcgcactccaccctggaccgcctcccctccctgatgtcacccccccacttgcctttccgtagcctcagcgccttccaagctgccacagagctcacctctcttgacaggtattgcctgtctctgtctctcccctcaagaacatggcctccaggacaggggccgggtgtgtgcactgcgcaaaaggcacttcatggatgctggaggaactaatgaagaagtgaatgaacgaaggaggggaggcaggatgagatttggggcaagggcagtgcccatgaggaccaggtgggggcaggaagtccccatgttctctaggggccggggcaggaacaggaggactggaaatctgaaagggacttgggggccctgatgggtggtgggtgctaggattggagcagcctggctgggagggagcagagcgtgagtcaaaggaaggttattttaggatggggcccgcagccagagagggcggcgcagctgagctggaggcggctgtggaagggcccccaggcctgcctgcttctcgcctctagggctcagcctcaggctggccctctggtaccctgtcttgaatctaagagtcccccaacccccagcagactctcgtggtccctagctggacagtacaagagctctgagcagggagcggctcagttccagggaggtccagaagggctggtgccacaggactgggcgaccctttggatagggggtttgtcctctgctctctggtgtggcagctggactggagcggggtggacagtccggcctccccctgtgacctgcagagggccgtgctggagccacctggctgggcgagggtgactcaggtccaagcccttggggtgcacagtggttgggagggtgagtccaggggtccctggcaggctggggactcgcgcagagccctgtgggtgtttgggtagggcagcaccactgcagacatggcactgcaggccctacctcccctggccccccacctccattccccagacattgccccaggttcagcactgccctgactggggacagtctgcagaaagggttgaggccaccatggtggatgggcatctcttccccaaggaagagatggggtccagggactgcaggggatgtggggtggaggaccccttccctccttccttcctgggccggggaggctggggatgagtttggaggtgggccctgagcacactacatggcccagggtgcccagtggtcgtccccaccctgcacacacacaggaatgacactcctctatggaggagacctccccagcgctgaggcctctctggagtctcagtgttggcaggacatggccaggacttggtcctcgagggagcgtggaacacagccgaattcggcccggaattgggggtcacggatgcctgggaggggcctgcaggacatagatggataactatgagctgtccctgctgagcagctggtggggaggccacctttccacccgccctcctgagagatggaggggctttggggtgggcccttgccttggagagtctgagctccctgggccgcctcgcccccacaggttggcgctgtacgtttatgagtacctgctgcacatcggtgcccagaagtcagcccagaccttcctgtctgaggtaagccaccacctccaggctggccctccctcctcacccacactccgggggtccttcatttccactggggatccagggggtgggcccgcgttgcccctctgatggccctgggaactgagggctctgcagggtccaggccctgggctagcatccaggcatctggtccacatgcccagccgggacctgccacacatcctggggccctctgcccaccctgttacccttccctccccactccctccctgcccagatgttctctgggcaccctgctgggtggtggggcagggtcaggtagggccaccccctcaccaccttcctttccctgcagatccgatgggagaagaacatcacgctgggggagccccctgggttcctgcactcctggtggtggtacgggctgggctgctgtgggtgggctgtggaagggggttgagggaggcacgtggagcaaccatcttcccctttggcccacagcgtcttctgggacctgtactgcgcggcgcctgacmgaagagaggcctgcgagcactccggcgaggccaaggccttccaggactatgtgagtcctggccccagggactcaggggctccagggcgggaggtgtgctgggcctgtggctggggaggtggggtggggggctgcacagccagaggagggctggggatggtggcagtttggggttgacaggcagagctgcagcctccactcaggctcttggccacttttggggggtccttccaccctccacttggtccagggtcactcacagagtaagggaaagctctttccactgcacacacttctgagggtccccacagccctcccacccccattggggcactggggggtgccatttccccgcatctcatgtgagcctgcgtggagatgggggaagctcactgccttccccctcctctgccgtgtgtgcattgggggtcactgctgctcctctgagcggggagcacaggtcggggtgcctgatgggccaggcactgggacactttctgaccttgccaggtatctggagctgcccactccctctctgctgtcattttccctctgggttggaaaaggtcagaggccggcctggagtggaggctgcctggctaacactaggggatggcagcctcctgttgtcatggggcagcagatggcagcccttcccttcatcctctgcgctggaccacctggccccctctgttgggtctgagggggaggtgccggctctgccggtgggcgtctggggggcgccagtcccgcccaccccctaccccctgtgcgccagagcgcaggccccagcaaggcagaggcggcccgaggggtggggcgcccatgtctctgaagatgcctccagcactctgcatgagagctgggcaggctgaagccctcctggcgtcactgctgttcacccccatggtgtcccactactcgtgtgtggtccccttgtcctagtcccgctagatctggggccccgggggtgtctggagctgtggacttgggcgactctgcycccatccctgccgtctgggtctagcatcctctctgggcgccccccgccgggccaggagggcggagctggagagtcggcgtgaacgcgcttcccaggcgcgcagcggttaccatggcagcgccggcgcagagcgtagaccgcagggcccagggcggaggccgcccaagccctggggtgaccgaatccccgcggggactcgtcatgccgggccgtcgcctccgttgctctcgctctaactgggggcgccttgcccgccgagcctgcacggaggcggccccttcctctctcgccctccgaggcgggggaggggggcggggggggctctgttcgcccctccccggctccctgccgaccttggcgtctccaggaaacgccggagcgcccagcccatcgccatggcaacgcgggccgggccggctcctcttcagggatgattgacgtagggggtctggcccgggccaaccgccggggagggcgcgccgcccgggattaactgctcagggcctagagttgggaagctgcgggtcgcagggggcggggggggggtgcggtggagcgtccccgaccaggaaacgctcaggcacccgctgtggcccgtgaggggattgccctccctgcggggtggacagacacagggctcaaaggtgccccctccccaccctcggggagtggaccggaggggccgcctgggagggcagctgctccaggccattgtgtttgcgggagggggcggggtgggggccagagcccagaggggacctggaagtttggaactgagaaagtggcacaggagtagggcacgagggctttcgaaggatttgttttgggccttgggagtgctcgccgtcacggtgggcttagggggctcccgsctccagcccctcccccagtttaggaccytggcgggaggcttgaggctaacctcagagaaggggcaggaaggggtcaacccgcagccccacagggggagggaggatttctccaggagccctcctctaggcagggggccccttgcagcagtccctgagggcaggaaacgctgtgtgactgtaggcagagtgctcaacctctctgagcccaagtggctgtagttcatgccacaaacacctgagtgtccctgtgtgctggcttgggccgaccccagagagagcccatcaccttctttttggggtttggggcttggcctggacsatacagacaggggccaggagagaagttctcccctccctgtccccagacgtgtycctctgccctcatagactgggcctcccttcccacctcacatccccctccccaccttccccctgccagaccctgtaggccccatagcagacaggtctagaacttggtccccggccaggtctgggctgccaccacaatttctggcagatacaggaagccccctctccagcaccctgtcttgtcgccttctccatctgagagaggctgggggatggggaccccaccccagaatcctgcttttcaccctccctcctggacgaagggcagggtggggtggggcaggggtctacacttgttctaaggtggagccttcagggaggctcttgaaactgccggtatatttgtgtgtatgtttatttggggggtcctgagtagagttggggacccagctgagctgccctgccagccaggacgatgcagggccagttgagatgggtctggagtggggagcaggtctgtgagaaacgagggcgacactggatcctgcgtcctacagggtcttcagacccacagatcctcaggccgacaaccccagtgtgctcactgaccaatgccagctcgctgtcccatggggccggccacctgcagagaggagggggcacaccccaggtaggaagtgtccaggtgtcctgacctggccctctgggtttcccgcacccttacagagtgctgcagccgcccccagccccgttatggggagtatggccccaggtgacacaatggccgcaggctccatggcggctggcttcttccaggtatggccccggctggagtccactggcccccaactctggctgaayatgcgtttgagggtggggggggtcccacgtgggcagaggtcatgaggccggcaggctggagttgggtgggagggtcctctgtgccgcaggtgtgcccaggtgggcctttcaggggccagcgagggagggcccgagtgcagtggagggtgggtgtctgtgcacttggcctgcacatgtgtgcgcacagggtgcttggggatgcagtagccacagtggtcctggtgaccactggyrcctgagtcctgccctcaagccttcccacaaggtccctgtcccacaggctggcccacccctctgcctccatggagcccctcccctcctcagccaaacccagtagggcctcactcccccccacccacctggttctgtcctcctagggcccccccggctcccagccgtccccccacaaccccaacgcccccatgatggggcctcacggtcaggtaaggagctgtggtgcctgcccctcacacacacacatcccctcccccagcgccgccccctcccaccctcaagccatgaggtcctggctggtgccagctggccgggctttgctggctggttctggaggagggggctccccaggtcgggggccccagcatagcaggaatggggtagctttggggaccagagggtgggggaaggtgctgatccccgcccacctcttccagcccttcatgtcaccgcgcttcccagggggcccccggcccaccctgcggatgccgagtcaggtgagaaagggatgaggggagggcgggcaggagctgggccggggagggagcaccccacactcagtgccgccgcaccccctccgcagcctcccgcaggcctccctggctcccagcccctcctccctggcgccatggagccctccccacgagcccagggtgagtagggaagctccagcccctatccygccatcaatcagaattccagctctcagagcccagaccttgctgcctccccactgtccacactggggaatggtccaggtccaagtccccttccttctgccccaccccagggcatccgagcatgggcggcccaatgcagagggtgacgcctcctcgtggcatggccagcgtggggccccaggtaagagtggagccctggtgggtggggccttcgggctgtccccggtctacccctcacagcccctttgcctccgcagagctatggaggtggcatgcgacccccacccaactccctcgccggcccaggcctgcctgccatgaacatgtaagaccctgggggatcctaggagtgtgyagttcgcaggccaccaccagcttcatggctgggtcagctggggcaggtcctgaatcctcaggacagccttggatattgtttatttcatggccaccgttgaggggaaactgagacttgaagtagcaattagtctcctggggccagtgatgggttgggattggaacctggcagctcatggtggccacttttccagcaacatctgctgctctgtggtckgtctggggatacagtggagcagggtgtggggggtgtgtggtgagggctgtgatccacatggactagccccagagtctgtcatccgcggtctcttccaggggcccaggagttcgtggcccgtgggccagccccagtggaaactcggtgagcctatggctgggtgggcaggcttggggtggggtgggagggacactgggtgagccgcctggctgactgctcacagctgcccttgtccccagatcccctactcctcctcatcccccggcagctacaccgtaagtctgagcaaagctgggtcacccctgggcaggggttgtgggatggcagatgaggggccatttctcacggttcctgtctcttgtgtgcagggacccccaggaggaggtgggccccctggaacacccatcatgcctagccctggaggtatggcctagtaagaggtgggggtgtgctagggtgggtgtgtttgggggaaaccccgtcacacctggcacccttctggtctcccccagattccaccaactccagcgaaaacatgtacactatcatgaaccccatcgggcagggcgccggcagggctaatgtgagtgggggcttgcaggggtgcttctcgaggcggtgaccccacttggggaatgggtggcccgagtcccacgctgtccccatgcccgcagttcccgctcggccctggcccggagggccccatggccgccatgagcgcgatggagcctcaccacgtgaacggatccctgggtgagtgggcgtccctgctcccgcccacgttgccttccgggcccgtgcgctccctggctgcttccccctgccgtcagcccgcctgccgggtggaggcgtctagtggcgtcctgagccccccgggggccgctcagtgacaggggctgccccgagctggagggggatccagcgaccaaaccagaggatgcactgaccgcccctcccccccaggcccaaccctccacctggcctcagtcccggggttcctggcgggctgtgcggggcgggggcgcgtcggcgggggcagcttgcgagggtcgttggcccctggaggccgaggggcatggcgccagcacgtctgagccggtgcccgtgtctgtccgtgtctgtaggctcgggcgacatggacgggttgccgaaggtaaggaggctgcgctcttgccgggggtgggatccggggggggyggcggggagggggcggggcggggagttgcgmgctgacsgcggccgcccccagagttcccccggcgccgtggccggcctgagcaacgccccgggcaccccgcgggacgacggcgagatggcggccgccgggaccttcctgcacccgttcccgagcgaaagcgtaagcgactgcgtcgactccccccccgcggcggcgtcgggccggaggggcctggcgggcaggccccggcggggcggccggggggccagagcaagaccgtgaccgcggcgggccaggtgggggggcggccgcggcatcctttccctctcctcaacctctccccaccccccaccacctcccgctcctatttcaccgtcccgatcccatccgcccccaccccgggacccgcgccccagggcggccttcccatgcatcgcccctcccccgttccctcctgtccccaccccatgtctgcccaggacccagccctgccctgtcccccattgtccctgggggcgggtcccagcctcttccggagctgaactcggcccctgcgcgctgccccctcctctctccgcagtactcgccagggatgaccatgagcgtgtgatggggcggcagccccgggcctctctgcgggcctaggcttctgcccagcgcccctgctcagggcgaggggctgaggtcacacctcgggcacctggactcctggccaatcaaggcttgcccagctgggaggccccacacgaaagactcttaccattttattaaaaacgcaaggacctcagagacgttcttttctgtatggacccttyctgccatttgtattttgtcccagagagaaaggctctttggggggcccctctccccaggacgtcagggggtggggcccatmaataaatggaagctggttttggtttttggtagcttgtctcagattccctctttggccttctgccaccacactctccaccctgtggtcttgttccgtccccgcccccatctagccccacctttgagaactgggggcagagcgaggctccaggttctgggctctccctgggagttggggtgatgaccatgggcagaggggrtgggactgaagctgggcgctcaagagtcggggaagtagagggaggcagagtcaggtcacaggccccaagaaccccaggtggaaggagggctgagtggcagcgcctttatttgtgggggccttcaaggtagggtcgtggggggcagcggggaggaagagccgagaaactgtgtgaccggggcctcaggtggtgggcattgggggctcctcttgcagatgcccattggcatcaccggtgcagccattggtggcagcgggtaccggtcctttcttgttcaacatagggtaggtggcagccacgggtccaactcgcttgaggctgggccctgggcgctccattttgtgttccaggagcatgtggttctgtggcgggagccccacgcaggccctggagaggtcacacagcttagcagagccagacacccacagggagaaagggggggtatccctgccacctacagccccccaagccctgtgcatagcttagccaggggggtatctgggccccgggcgggaacctggaggctggggtgcacctgaggatgttctcgatgcagctgcgctggcggaaaagcgcattgaccaccgggctgccgggcggcactagtggcgccttgaagaggaagctgagcagggacagcacggggtggaaggtctgcggctcggggtccatgtcagtgcagaagctcacgcgctggcacagctcggtcagcagcgctaggtccagcatgatgggtgcggccagcagcgagtcctgcggggcgggtgggtcaggagatgggggcggtggccaagccctgcctcccatagcagcccctgaagccgcgccgcacctcacacgtgttgtgcagcaccagtgtgttggttccgcccagcatcagctccgaggtatactcatccagcgcgcgcttgctgtcacccacgtacggcacatacttgatgaccacctggagtgcagcaggagtttgcccgggtccctgccacccctcgccgggcaaccccgcgcccgcgcccgcgccccacgcacgcagtggtcaggctcttcgccgggcgtatagagcactgggttgctctgcaccatgtcgtccaccacgttgctcttggacacctccttagagcggaactgcaatggcgccgataggttctccccatcgttgttgcccaggtggttgtaactcacgatggacatggtctgtgggtacaagggaagccccagcagctgcaggccctgcggccccacaagccaggtgctcgcggcccaggcccccttcctgcactcggcagctccctaggcccacgcaccttgaggccggagccaatgaggaagtccacaagcacggacttgactttggtctggcctgacttgaagtcatctccgcccacaaaaacccggtgctgccacgcgagctcaagagctccgggcaccagggtgttctgcggagacccattgaggaaggcacagccctccaggatgctggccacggcgaagagcgtggagggcgacacctccagaccgagctgtgggcaaggcgggcagtcagcacagagctgtgtctgtgactggccctgcctgacccgctccacccgggcgttcgcccacctcaatggtgcgcagcaggttctcggctgtgtcgttgaggcctggaatcacctcacagaagcgctccgtgttcgccgtccacagcactatgactttgtccagccccgcgctagaccggaagtctcggatgtccctgcggatctgctccagctgtgggttggatggtgagggtgtggggaggatggagagggtgtagggaagttggttgtacatactctcggactcacagaggcctgggctactcagttccccgggtgtcaagtgaggcctggattcgcggggtggggcaaaaagagggaaccaagtggcgaagaacaggtggcaggaagcaagggatgcgggatgggacagcacctgctgcgcacgcgagcctgggatgaggttgtccgcgcgcgcgctctggttggccgcgatgaattcggggatgtaaacagaaggccggggccgcagggcctccatgtgcggccacagttgctcctgcagcccccagtccagcaccttcgcgcgccgcatcgcctcggccaggttcagcgacgagatgtcccagcctggggggaccctcacactcggccctgcccggatcctgggcccctccagaccccatctcccatcccgccccaccccggcccagggctccgcccaccatcgaacacgaggtcgttgggcgccaccatgggcagcaccgcgctgaagggtacgaacacctcctggccctcggcgtccaggcccaggctcacggtgcccgcctgagtcagcgagccgtagtagttggcctcctgggggtcagcagacacggcgaggtgacgggtgggagtggtgaaagggccgcgacccggcctgggccccacctagactctcaagccccgccccactttcgggcatttttcagttccaggctcacagccaggacggaagccgctgcccccaggcccctcccctgagacctccggcaccttaagctccgcccctgtaagactcccgaggagtccccgctacctcgcgaaacccttccacggggtccgcctgcagccaggccccgccccctgcaagccctcccgccccacagagcttcgccccctgcaggtccctcgcccactacaggcctccagacccgggcaggtccctcgcccctgcagcccctcgccccgcggaaccccaccccctacagcccccctggtcccgcagagccccgccccctgcaggctcccgcccccgcccgcaaggactcccaccaagcctccctacccaccacgcccctcccgcccccaccttgcggccgctgcgcgtgggccaggacaaacgcagtcgattggccagcaccgcggcggtgagtgtggagccgttgttcccgccccagccgacaagcatgaccccgagccggggcacctgccgggcggtccggaaggtgaagcgcgtggacgtggggtgcacctgaagacaggccgcgcagtgaatcccgggtcccgtgcccttctccccgagccgccccgctctccccagcacgcctccttcctcagccccctggtccaccttgagaacgccaccctcgcggctgacgcgcgtcgtccggtactcgtattgcgcctcgatggcctcggggccgtagaccacgtccgggctctcgacgaagaactgggcggcggcctccatcgcggcgggctgggggcccggggtgagcagggggtcagcggggactctaagcggccggggccaagccagcctgggtccccacggaggccgtccctgccccgaaccgcactcaccggcgcagagtcgactcaggcagcggcggcggacagcgcgggctctcgggcgcgcgacctccggagaaaagcgctgcggcccctcccccgccccgcccccttccccgcctctcccgcgctgggagggaggggcccaacgtctggagacccggttcgaggcccgacaacccagagccaccgtggccatcgggtccccgcctggcggaagtggccaggcgtccacgagcgcggcgcgtataggttcacctcgctcgctccgcagcccccaggggctcatggctgcctatcccccctttacaagaggacaatgaggctacacatgagcccagccacaagccagggggtggagctgggcagggaagctgggcctccgggggggtaggtagggggtctgggtcagagacactgcaggggaaacaggcagaggaccagaactccaaagccagaatctcctcggagccacactgccacctactcccccttcgtgggcagcagcacctaccaggcagtcccatcccctggctccccatgtccgcccccatccatctcgggggacaaagtcactctgtccccacggggctcacaaggatggggcctgtttggcctgtttccccacctgcagcaggagggcttggcaggagtgggccggagcgggaggctgttcgctggaaaggggaggggacgcacaggcgggcagggccgaggcaggggaggaatgaggcctgcactgcagggcgcccccctcatgcgcgctgataagggagcgtgggaacccagcgggcaggccggggcagctcccccaggaactttccaaaacaagcgcctggaggccggaaagtttccaccactggagctggcccaaaaggtggatagttgggaacgtttgcaagagacagggcctgaccttggaggatgagggcttaagactctgggtccaggcctcaccctgaaggggccccagtctgagggagttggaagtggactgggacacccccgccccagtgggtgggaactcacaggcagggcccctgcaagacaggctccccagatgagggggctgctggcaagggttttgagacatgaagaggagttcactgaaagaaaactacaggccaagccacctgagccacccagacagggcagatgaaaaattggctacgtgggaggcagtttggggtcttgggcagaccctgagggctggggatagggagtgtgaaagagtatttggtgtttgttcctggttcttggttagacattgagctcaatcaccagtggccaacgatttaatcaatcacatatatgcaaatgagacagttggggctcagaacacagaaactcccctcagcctcaagttatggggccttggcctgccccgcgctttgagcagggcatcggaaagctcagaatcgagtctctccgaccttctcctgccctcctgcctctagcccctttctcccctggaaaccatagaaaccagaattcctcttccccaaggcaggtcagagacactggagcccttctccccttaaaaaaaaaaaaaaagccacaaagccggcaaaggtcactctctgcctgctcccttgaagaccctcattccgggagggtcctgcccataccctggaggaaggaatgctacccagagtctaggaagtctgggcaggctggcccccctcccccacccagtctgctccctttaagatctacagtgtttcaacacattgatacacattcttcatagaacctaagccgaaaaataggcagtcagccaggcacggtggctcatgcctgtaatcctagcactttgggaggtcaaagcgggcgcatcgcttgagcccaggagtttgagaccagcctgggcaacacggggaaaccccgtctcaatacaaacaaacaaacaaaaaatagccgggcttggtggcgcacacctgtagtccagctgcgtgggaggctgaggtgggaggatcacctaagctcaggaggtgtaggctgcagtgagccatgattgtaccactgcactccagcctgggcaacagagtaataccctgtctcaaaaaaaaaaatggggtttaggggaaaatatggaggggctgggagggtggcatgcctggaaaaggcatggaagcttcacggcccgcccataccttgccctgtgcgcctcctccatttggctgtgagcattttccggagttctgtgagctgttccagcaattatcaaacctgaagtggggtcatgggaactcgcaatttattagcctgcttgccagaagtataggtggcatctgacacaggtgcagccctgtgggactgacccccataacttgtggagtccgataccatctctgggaatggaactgttggacatcctgtaggtactggaggatcagagaatcggggagtttgtgcctcgaggcgacacgtgattcaggaacctgtgtagttgagagacatgaggaaggtcccaagacccagccccggggagcctgtgttcacagggccacctgtagagggtgccggaggatgggagctggcacagggcagctggagggaatcggcatagaggctgggctgcttccactcccagcagttgacaaggccgaaggagggggtttggcccctacagtcaggcctgggtgtgctgaagtcggtggtgagatgcactgttattccccagcaaagtgtgggctccctgaaggcagggatgaggctgagtcactgctgtgttgcagagccca

SEQ ID NO: 94483 - DNA, 156470 bp, Homo sapiens
tggtaaaatagaactcattacttattctcaaaagaatgctctatttcagaacaattctattgctaatggaactttgaatttagaaccaaatgccaagaatgtttttaaacactctgttatccttctgatcaatttagatcagccagatataacatatgtgagaagttatctaaaattttcagcaataaaactgatatgatgaaagcttttttccccttaggtatcatctagtattgttagccaggttgttctcattgtttcttttttattgtttaaggctgtaccacatcactcttgtaatgctcaccaaagttctatggaatcattgtttgagattcaccatatgtgtcttttatccctgcccaataggtatcttggctacatgtcagtttggcatttgttactataagaacttcaattggttcacttgcttctgattctatccatgctgtcagcatagagactttcaaatagccatctctgggaccaaagaaactcacaagatagcaacctgttttaattagatccttctcacccaagtacttcccactcgagacaattggtatagtcagtctgcctagtttggcgttgattgatctctgaaacacaaatccctcctcactctgtttttgagaccctttgtctagaatatagacagtgccaacaaccctgtaatttattatatggtagtaatttattgcggtcattttatacagagaagagatagggtgaagaatgggagtaagtgtagagcatgtggcttctgttcagttttctttcttgtggattagtcaagacatcagaaccatatcatgagatcctcaggctctgagttaaatccagtgttcttcattctgttcagcatctcttgttccctgtctttatttatagaagtgataggaactccagaatacattgaaaattatggaacaaatataatactcagagaaaatttcaagtaagaattctgttaaatatggagcttatcgtggagattatttcccctcccctcaaactactgatatcaagaacattctcagaagctaaatattgccaagaggctcacaagaaggcacaggccttgctagtcaggatctgaggtcttaagcaccaaatggaagagtacatttaagcaaatggccatgtaagtatggtagttaactgggccatgaacatgaaccattggtctcaaaaggccattccatatatgagagatgaaaaaaaggtcacctggttctgtggttgagaaagtaaatctccgtaagaagactgaaagcaagtgtcatcatgcatgattttaagttctatatttattatatcgttatgagactccaagctaagatgttaacaaaaacaaatctyagcaccaccaaattaaatccattagatatcccagtgaagcaaaagtaaaatcatcctttaggaatatttcaataacccatgaaagattcctatagaaaaataaatggcttcccaaaggactataaatcatgctgctataaagacacatgaacacgtatgtttattgtggcactattcacaatagcaaagacttggaaccaacccaaatgtccaacaatgatagactggattaagaaaatgtggcacatatacaccatggaatactatgcagccataaaaaaggatgagttcatgtcctttgtagggacatggatgaaattggaaatcatcattctcagtaaactatcgcaaggacaaaaaaccaaacactgcatgttctcactcatagatgggaattgaacaatgagaacacacggacataggaaggggaacatcacactctggggactgttgtggggtggggggagaggggagggatagcattaggagatatacctaatgctaaatgactagttaatgggtgcagcacaccagcatggcacatgtatacatatgtaacaaacctgcacattgtgcacatgtaccctaaaacttaaagtataataataataaaaaaaagaaaaataaatggcttcatcaaagataagtttacataagcaaattaccaagcatgcaaatttggtttgtatatgtatttgctttgcacatacaaagcaaaactttaaaaatataaagagaaattgacagaaacagaactatagtggaggatttccaccgtcatgctgttttggcaaattaattaattatacatacaaagattcgtatgatcattttctagctacctacttttctctcaaaaaataaataacatgctatactttagaaacttattataagaaatgattttgattatatgtgtgtatgtgtacatacatatatgtatacatatatacaggtatcgtacagccaatagcatcatggtttcaaataatttaaataaaataaaatgggaaaaacaaaaagtatatacaagaaatattaattttttctctctgaaataaaatgtattaaaatgtttctagaattagaacactaggtgtcttcattgatatctttatgtatcttctgaatttctcaaaattgctgtaataagaaacataattagagtgataggacatgaaataatcctaaaacttggggaaacatgtataatttgatattgctgaagttatggataagtttagaaaatgggtaggagttgagactgcaaagactgctaagagtctcttcatgaaatattaattgaaccatttttaagaaatatgacttacccccacccccagaggttatgggacacctctaagaattttaagttcagaaatgtttatcagatatatattttcaaaatctctcagactatacagtatgaattgttgagtgcaaaatcacccaggaagccagactactgtattaataataataatagctaacatttgctggctgcctacaacatgccagagaccaaatgttgaacactttatatattctgtcatttaattttggcaacaagtaagaactgttattgtcacccttttacacatgtggatacagatgctaacaaagttgtccagggtcactcagtccctgttagaacctggctcccatcatagataatctagaaccaactcttaggcccttccccactgcattatggtgttgcttgtcaaacagataggaagtggagcagagagaagttcttagcaaaagaaaaagagcaagggatgagtccaagatatttaactcaaatcacttgttgacagattggtgggattaaggagagaaggaagtcaagaataattcaggagagacaggttgaattgaatgcttttgtacatagtaaaatcattaataaagtcactagagaaaacagaaaatttactttaatttgaggtgaatgttcgtatcttcttctgcttgagtgagtaaaatgcaatgaaataaaaatggcttagtcatatgatgcagcaagcatagtatagagtgcagatgcaggatatggcacttactcacttcgtagtttttaacaactggtttctttatttttctaatggagcccaagcttctaacctgttatattgcaagagagaactatagaaccttccacaaacttctttttattctcattttatctagagctttttagaacaggggtacatattgaaaatgttttatttgagtaatcagaacagaaagatgtacattaatactaagtacaaaaacatatgcttttcaaatgtataaattttaagcattcataaattaacaccaaactttacttaccagtaaaatcacatctattttaactcctgtttattcattagattaaacattcttaagatatttggtctttaagattttggcatttgtacaaattttgtttaaaaatttgagatcatagcattttccatatgatatgaattaaaataaaaaacaaatacttttatatttataagacttttctgtaaaaaaacacgtatcactatggtcaactaattggtatatgaaattttcttcagacccttttaatttagaaaacgattaagcaataatttttttttccctaaatgttcttgttcttagtagcagaagatcatatcatatctgacttatcttagaggtcttattctccaaaagtttagacttcaattttaattgccaatcctttttgaggtttagaatgattgttgactccattatgaaggttgccttgttaaattattgttgttgaagttggatcttttaaaattatttttaaatatcatgttccctgttgcagaatttaaatatagagagaaaaatgatagtaagcatagatataaccagtaccgtccatttcacttgcagtggaacaataactaacagctgagctctgctggtacagctaatagatttagctctatgaatgtacacctatatgatagtcatgcttaggtaaataacaaccggagttttggtgctttacagagttttaagcgcatccaggaattggataacttcactttagcagttcagggaatgttctccaggttaaacatccggctgggcgcggtggctgacccctgtaatcccagcactttgggaggccgaggaggtcagaccacgaggtcaggagatcgagaccatcctggctaacgcggtgaaaccccgtctctactaaaaatacaaaaaattagcctggcgtggcggccggcgcctgtagtcccagcagctggggaggccgaggcaggagaatggcgtgaacctggggggagaagctttcagtgagccgacatcgcgccactgcactccagcctgggcgacagagcgagactccgtctcaaaaaaaaaaaaaaaaaaaaaaaaaaaagaaagaaaaaagaaaaaaaaaatccttggttaactgtgagaagaagactatgacctcctcatcctctttgccctttctagtgcagttttaccgaaggatctacacgatttctcttccactctttgtctttttcctcccttaacccatttatttttattacctgtggaagtctcactgcccaccccccaaacccccacccatgcaacacacaagtggtaaggatggtttgactttgaatggtaaatttcttctgtgtgtttatactacggtgtgcatcggttggctcctggtttacatttgctccatcagccaccagggctgatgcgtattcctggccatggacaccctggctgggtctccggaagaccctaggtatcctgcacgagactattcttgatgactatgtcattttagctgcaaaccactgaacccactgcgaagattattagggtgtgacaatacacgtaagtttacatgtgaaagtgagggggggaaggtaggccggtggtctgctcgaaggctattttttcaaaccctctcttccactaaaaatgtctccaattctaatatcctaagaacttgtatagaattttccgtttggataaatctagtccttagggctttaataattttgtgccatgagacttttaaacacgcagttccatttcagcgcttaaccgcagcaccaacttacagcttacctctcatttaggaacgtacctctgagagtacctctgacatgtaacctaatttaagactatcttttccttttcattagactgttggatatgttttaaccttgctgattgcctcaaaaacatttttaaatagagcttattgttataaagcataaactccgtgagctcaacggtaggcaaatctacacttgagcacccaaggctgcagctgggaatgaacgaactcatcaacataaacactcacgccccttccttttattttagaccccttttcttctacacctgatctatgccaggtgagaagtaggtgggcacgttaagatacagtcagccctgggcgctcagtgtagtgcggaaaatgagacacccctggacatcctctggctcagctcctttctctcctgttcaggtgctcggcatttctgtcgattcccgcaggtgccccgtgcacccgctgccccaggcgcggccacctgccacgccccactccccgccctctcggcgccgccgcagtgcgcagaacagctctggtcctcacagccagtgcaccggaggggcgcgctcccgagctggcgcagtttcccagcgcggtgcccgcccctcatcctcctccagtctccctcccctcgccgactgccgccccaggctccgccatggggaatgtgccatccgcggtgaagcactgcctcagctaccagcagcttctccgggagcatctctggatcggggattcagtggcaggggcgctcgaccccgcgcaggtaccacctcgcggcccagggtgtccccaccctcatgcgcacactgacagccagcctctctccctgcaacctcttggtgccctcctccctttatgtcacctcctcaccccaggacccttcccgcagcagttctgtcgtgttaggccgcaccccttaaacggtttcccgttatctctcttcggtgaatgtatcgacccgcctctacagatcagaccctgcaaaatccctgcctgtgaccatttgctggtcgcctaaagaaaagaattccttctctgtgttttcctggaaagggatgcattacgtaatacaatttgtattcataggtattccttcaaggataccgcccttattctcagtgctccttgtactgtgtaacaaagactacaaatttgtyacaatgtgaggcagaaaaaggaatgaaaccggtagaaggttaagaagacatagtaggatgaaataatccatcagaacattaattatcccaaatgtatttgtgcttcaacaaacttgaaagaaagtgtaaataacagcaatttcagactaaaatttattcccacattgttcctgaaagggcatgttaagacaataggcaacttaatattattcatatacttatgatttaatgcactcttaaccagtgtcagataaataaagaaaaggtgtataaagaaattaactttttccttaaaaaacttgaaaatctaaaattccacaaaatattaaataactgataattgttatgaaaatgttgaaacatggaataaaggaggagcactgtgaggacttcttgttaaattacaggtgctggatacaagattatttctgattcgactagtgaacaaaataacttctgttattgtaatattttagtcattaagcataattgtaccatgtggatttaaatcaactattctaatataaaatattcattttctattgtgtattctcagtttagtgtatcatatgtgaaattgcaatcttatctttacaaattggaattcagcatttgtgttctttagaagatattttgtttctcgttacttaaaagatggccatggtcatctaactcaaaacctgttgatgacagtggtagaggtgaaaagttatcctttatcttcccacatgttaatatgtctatttaattttcctaccttctattttgaccttcctgatgtaacttttatcttaatgttcttgactttttaaattcagtctgttatttaatcaggaaccattaacttatatttcctaagtctgagagtttatatgatttttctttttgagtgaatattatatttctctctccctctttattttctgatttacacattttgtgggttttatggacaatgatagaagattggttgcaggtaaggatgtcttatttgccctgctaagatatggaagcaggttaaatgaaaatgactaggattcccgagaaataaaattctggggcattcatcagcttaatgaagacttttttggcccattctgaagatataatagcccttctctaaatattgcctttttacccaccaactgctttgcctagaaaactcttatttgtctctcaagtacagattttaaattttttttttttttagtccagccctttgctccctccagagttatgcttctttttgtgttctcgggaatttttaaaaataattctgttttagttccaatactgttgaattgtgattttttctatcttatcgtaattgaactcacagcagcactaacatctgacacttggctttttgaactttatcttcctagacttctcttctaacaaaccttcactgctttcagcccgatgtctctggcttctcagtctccttggcaggcacggtggcttgtatccactgggtaaatatccagatgccccatcactatctacactcttcctagtgtgagtttgagtgacaatctacactcactgatttgattactgtttgtgtaccagtgttttctagacttacattcccctatttctcttgaattccagtccagatgttcagctgctcatttgacatcatcgcttaggtatctcaaaagcaactcaaactcaaacattttcaaaattttattaatgttctacttcttccaacactggactttctgcaatatttcctattgcagggaatgccagtataatttattcagttctatgagccatacaccagaaactatcttctttcatttccctcacacccaaagtatcactgagtcctgcaattttacttcttgaatttctttcaaatctatttttccaacttcattgcaccaatcaattttaaaatggcattatctctcatatggatgactgggctgttgcagtagtcttcttactttccaggaatccctcttcaacccaatgcctatatagctaattggaaagtgttccctatttcaaataaaataatgctatttctctgtttcaaaaccatccgtgaatttccattgcttttaagagtggacaccaaaacttttaatgtgttttctaaacttcaaatgatcttttcattgcatctctcagcaacatcatcttaagctattcttttttgttcttgccactttagccacagtggccttttttgagttctataataaattgtgttccctctggaaccacagtgtttgcttaccttcctctctgctaggaagattgttttcaacaaattaacttctaattaatcttccgccctcaacttgcatgttaccctctcgtgaaatctctcccagactctccatgccagcagcttttgttagacttctattgcatagtaacctattgtagataatatgcattatatatttattttcatgattacttgatatttaattgctttgcagatattaagcatagtaaaactaaggaagcaattcaccacgggattctcaacacttatcagaatgtctggttaattttttatggccaataatactttttgaatgaacaaatgaattaatgttttcccttataggccataagcatcacatgcccatgaagaccatggacttcttcttagcatttgttcaaggtccaacaaaatgattggcacactgtagcatcatgataaatatttgctaagtgaatacaaaatcagtgagaatggggacatggtatagagtttgatcttagcaccaatcgatgaatattattactgtttttctctcacctttttgtctcataggacctcatagtagtttaatggagagatgaggtaaaaatggtttctggaggctgtcaacacagcagagagcttaactaattctctattgttgaatctggcagagagaatcatgaataaacctgactcctgtaatatgaaataatttgattgtagttagaacagatagaaaattctgtattttgaaataattatgtgtgtgcaatagaatattgaaaacctcgatatttttctgttaccaacttattccatggttttgtgtgtgcaagagcatggccacaccttaatttttcagcttacatattagagataatatatccctgatgaattattagacttaaattaaatattgtgtgtatgaatatatacacatatacatattagaagtttaacaatgtactatcaaatataaaaagaataaatatgaatgaaaggcttattctatcacaggtccactaattaaattatgtgggtctctgtttttgctaatgacaatggttttgcagaaaattcccttaatagaccaagaggttgaaattgctcattctgtaattcaagctatctcttaggacctgttttattttctgtagttgtctctgttaaaaagagtataatgaagctggcttaattggcatgttttaaagttttgattaaatttaagtttcctagtgaagcgatccccctttgattttcaagtgttccttaagcaataactaaatctcttcacatattaatgcccttttgcaaaaataaaatttccaaagacctaaattctaatataaataatgtttcaaacctattatatttctaaaataaagtagtagattatgtgagattaaatttatagttattttacattcgattctgatcctttgtgttacatttgctgtcagcaaaaattatgattcagcgtaaagttatttggtgctaaagggtctctggaatttaaatgtattatatttctgcttaaatgtaataagatgataatgtatctttatacttttggcctgcaactgtgtagttgttagtacatttactaaatattttaggatgattgaggaggaattttcagacagggaccaaactgccatcatactgttttctatttgtctcatgtattctttatttgtctccttaccattttttattcttttccagcttcttttgaaatcatgtagcattttaatttctcattttccccctgaattgacatgttagtgatatacttttttttactatacccttaattgctgtctataagatgtcaacatacaaccgtggcttattaaaataatatattagtactattacaacttattaaaaatgcaaatatgactctttaacttcattttctgtcctctgccttttacgtttttgtttctatatacttattatctatatggtgtatttacaatacatatgcatacagtcaatatccatttatacttgtgcacatattttctctttttattcctttcttcatctccattttttcctcagattactttccttcaaccagaagtatttgtttcaatattttctttagtaaaaaaagtactaatattgatttttttcagtttttctttgtttgaaattacatacacacatatacactaatgtatatatatacacacacacatatatgatgtttataagtataaatgaatgtttactataaacataagttttatctaaaaaattaacagccatgatagcagtgcaaaatgcagatttctcaacagatacagtggaagccagttacaataaaatcagcgatttgtcttatttttggtcctttgatgataatttatctttcattcttttatctttgtatttggtttctaatagtattactatggcatatctaggcatactttcttttgcattcatctggctaataatgtacaacacttcttggatctatgacttgatgtttgttgggtttcatattttggaagcttttcaaccatttttgcttcraatgttgtttgtttcttgtttccttttaaatcttctccagttaggcctacaatttgaagaatattagaactttctctgtgccttatttgtttcttacattcatttttttcattctttcttttcttctccgtattcaatctgaatattttcttctcatttatattccatttcagtaatttcttcttcagctttgtttaatttgctgttaatctaatttattgagttcttaatttcagttattatattttgagttaaagtgtttctatgatttctaaaagataggcttcagttctctgccacaattctctatcatattataaattcttgaatacttattagaattattttagatcccatgtctgacaactccaatatccagatctccagttagtctgttttatgtattttccttcctggtatgcctacgaaatttaaataatatgttagacacctggtatgaaaataattatagatgtaatttgagactctgaataatactgtccttctcaggtgggatttctctttggtgttatcaaacaataagcgtagagataacttaaattaagctaatcaagtgcttacctgatatgaggtttagcctactttacttgtaagggctttacttttttctcttcatccttactttttgtattctgcagtcattcagaggtcctaactaaaacctaaaatgtttaccagggttgctcctccttgctgagacctgaattcaaactatttccactccagccttgctaggctcctggaagatctgatggttttggcttctcagttgctcatacagaattggcaaatgcctcaaaaagaaaagttctgctgactgttgggctcaccactttatttttttctcctgcatagtatattggctgctgaaatactcattaaccaaatttctgagactattaggttttcattaatattttatccaactaatatagtcattgtcagtgagaggtttgttgtgaacaagctagtcagccattattgaaagattatataataaggaaattaaatttaaaaataccaattgtgcaatttagtttaaattgtaaaaatatattcatttaccatactacttgaacttgttatattccattatatatgtatagtagcatacatactattcagattaccaatttgaattacaaagaaagaataaaaagattatctgcctcatgaaaaatattgtatggaaaaaatgactattccaaatggtttttggtatgaagaacaagttataaaggtaatgaatatatattttaaataatgttaaaagtaatattatgtccaattttagtatctgctctttgaagaacaatgtactatttactccctctttatgtgtaatatacttcaataaaattttgatagatgaataaaatagtttaataaaatttgttaaagtacttcctttataatattttacctctattgtcataatgtatatcaaatcttttcattttattagcataaagttggtaaaagtattttcttattattatttacctttcttttcaatcttatcttttgcattgcctctttctgatatgggtacattctctttctctttctctctctataagtcttcctacagtttatcactttacttagaagtatcttgtaggcttgtttatgctcttgactgtatgtgtatgtttgtatgtgcttatgcatatggatgatgtgctagcaactgatttctattctttgaaaaaattcttctctactttttctacattagcattttaattttctttaaatatttagctcacttgattttagtctttttaaaaattaagtgctttaagactatacctgcccatttctctattgttttgctttaaatgtatgtcttataagctgcttatatgattactctctagctttaattagatgaatttacctctaatcatgtttgatctattattttttattttttattttttgagatggagtcttgctctgtcacccaggctggagtgcagtggcgcgatctcgacttactgcaagctctgtctcctgggttcatgcagttctcctacctcagcctcccgagtagctgggactacaggtgcccgctactgtgcccggctaattttttttttgtatttttagtagagatggggtttcaccgcattagccaggatggtctcgatctcctgacctcgtgatctgcctgccccggcctcccaaagtgctgggattacaggcgtgagccaccttgcccagcgtttgatctattactatgtttatcctactttctgccaaatctatcagcctcactcaccgttttacatttcctatttttaaggctgtttatgccttttcagcattcttattttatatttaaatcagtactattgtttagagcaaaatatatattttaaagaatgaattcagttatcttgagaaaaagattgtttaattgttacaccatgattcttcaaataacatgtaccaggcatattaccattctcaagattctttttgttgatgtaaagcatctaacagatgaggtgaaggtagggagttccaaagacttgtaatttttacttgaggttaaagatttaatcatgaacacaataaagttagaaacttaaaaggataggtatttgacatggtttggctgtgtccccaacccaaatctcacttgaattgtagctcccataatttccacacgttgtgggagggacctggtgggagataattgaatcataggggtgttccccgcatactgttcttgtggtagtgaataagtctcatgagatctgatggctttataaggggtttcccctttcgcttggctctcattctctctcgcctgccgccatgtaagatgagcctttcaccttccaccatgattgtgaggcctccctagccatgtggaactgtgaatccattaaagttctttttatttataatttagctagtctcaggtatgcctttatcagcagcgtgaacatggactaatatagtatttgtggtcacagacttaataagtgagctgccacaaaaaataataagccccttttatgaccctatagattatggtcagaatggagtaaaagtccagtgaatttcactgaaaaccaaatattggatggaaggtccaccaggacattgaataaactgctgaatggtgtcaggatttgggatgaagggaatgatggtgaaataagttctaatggccttgatatatgaaggataccaatcatcaaacagggatagagactatatggccaaatcacatagattccaaaagcagggacttttaaattagtaaaaagaagtgggagtcttcaagaagtaatggaaattaaagatgccatccttaattctagtctctaagcaaagaataggagactaagcaggctctccttgagagggttacaggagaggtgccttcttctcaagggtaattgagacctcatctaaggccagtagataataggactgttcagtaaagaggctgagaatgtgttagaatgttttaggtgtgaagctgagtttayagctggaaaaataaagaagacttgaatcttactataacaggaaagtcagataactacgtagggttctacagaaggagtagaygattcttgggaataatatattgggaaatgactaaagaaagctggactgtaaaataaggtggcttatcaagtgagtaaatctcagtagtcttgaggtggctgtgagtctttttgggtatctcagcctcagccaagtcctgggtttattgcattttaagagagtccttatctctgtagyatgaagaatctagcttttaaagccacctttgatttgacttgacttacatgcacttttgaaggaaagcttaaggctgttcacattttgattcctgaagggaaatggctgrctagtgcatgctgagaacaaggccagcatcccaggggagtgcggctttgtctctgtgccattagcaagtgtgttccttggtgtttcataagagatatagccatgttataccctccttattttttatttttaatcaagtcacatatattatttagtatgagttgcttattataaggacttttgtagctatacagctaccactactgaacgctcaatatgaacccggcactccctgtttacatccagtagctcatttaatccttacaataatccattttacagatttggtaactgtggttcagaaaggttaaaaaaatgtgcctatgatcaacagctagtaagctagaattttaactcaagcagttctagttctaaagcctgcaatttttgccatgataccagtgcttcctaaacttttcttgtgataagagtcacctaaaktgtttattaaatatagaggaaattttgattcagtagctctgagttggagcccaattatctttatttctacttaacccaattttagtaaacactgtgttggatggtgctgctactcctctacccctgtatctgctgtcaaagggtcatgtttcctctaatctgtctttccagagctcctggctcctgcccatgaaaaaaagactgctatgatttttgacttcccttctatcctttttgaggttgagactagagttctgcctggaatagaattgcattggatacaaaaggaaaaacaacttggtttccaataaatttcctgttcccttcaatcttcaatactttctgtccttggatttctgttggctcctgtatttcttgctttctcagattccagctggctttcacatctttccctccccctactctgtgttcttgtttttttcattagctctgagctcctccaagtcttctggctttctttatgcttattcactctgtgctgtaactttccctgaccctttcttctttctgtgtctatccccttccaagtttagctgtttgtgtgtgtgtgtgtgtgtgtttcattttacttcccctaatcaaccaaggggctagaccgtgcacacccataacttagtgggttactctcatatgacccatggtttttaaaagatataaagcaaaattgtgtatttggaggctatcatttttatagaaattcagatttgaaagggattgtccagcctgcttaaagccctaataatgaaaacaaagtttasaatcccagtttcccaccactgttctgactatgtattgttagtctacgtagtagttgcaaattatcagcctaggtgagcccaatataacccctgaaatattttgtttagttgaaactgcagttaaaatataagtaaacttgaatgcctttaaacagaatttgcactattaattaatatatttagcttcctcaggaatcaagattatcttcctgtgattatagatgtttggttttatgatctttcacatgaacaattacatagggatatttaaatgagaccatttctgaacactggattatttttctgcagggtggagcctaatcattcattatcattcaacaagcaggaaattatctttaaattgccagaaggttgccatcttcccttttggacaatctccctttttctaagtgatcagaatttagtcctaaatgaaaactcaggtgtttttaatttcttctctcagatatagccatatttataagccaatttttacattttttcttatagaaaataataccaattagtaaatgttgttcccaaaacattcattccaaaaccagaccataaaataattttatgtgaaggtcatttttagaattatttagattcatggaggtttttatttttaaaatgtttctccccccatatagtttatatgactgccaagtaataacaaggatagaaaacctctgaaaattaaataagtaaataaacaaaagctgtggtttctaaacaataatgaagggaccggagctgtgagttccaaacacatttttaatacaaggaactgaggtttactttcctggttgagagagcagaagagctgggttctggcactccgacgctagcagggctgtaagtatcactgtggaagaggagggacaaagtgttatgagaaacagaacgcctagagcttctatctcaagggcatgacccagaccacattttcattcttcattgctgtgttcctttgaaagttcagttctccattctgctgtttatttagatcatgttaatttcttttccctgcaattttttcttgcaattcatttaaaaacacaagcctataaacttgttttaattcagcttaattcaattagtgataacaatagtaatctttgtggtgaaggtggatgtgagggtcaggtgggatttggatagagagaaggcattcctgttcagagtaagatgattgatgattttggtggaattgacagagcaaaatcatgggagttattcatttagttgtgtgtgtgtgtgtatacctataaaactataactattatctatattcatccatctatctaatctatcactttacaaaaataattttaagaccccataatcttataaattgttttatacattttttttcaaatttgatgagtttggaggttcactcactttttacaagtattaagactatttcttttgtatccttcacctctcccaatggccaacctcaatacttttgaagtacttgggataccmatccttgttttcttcatgttcccttttacaatatggttgaatagaatgaaatatctctttattaaatgtataatattagcactgstatgttgaggtctttttaagggatgtggctatattttatttagttttctgttatcccaaggacataaacacttaggtcttcattaaatgtttatagaagtaaatataaccaacatttctggtattaaactttaggtgattttagccaaattaactgcctttctgattggcaaaatatgtatttaattacatcaaatatatctttgagtagtaaaattagtagctttagttcttatttattctttttcatgttagactataatgcctacttttaaatcctggtggtgtttttagaaaatttgaaagcctatttgttccttttcttggctactgttgtaaagatcagagaaattagattccaacttttcatttcttttccatatctgtgtttctattaagttaattcacacagtgcacaatatgcatgttcacatgactctattttacaggagaaggagtagaaacattgaaggatgtaatgatcccctcagggttaagcagcttctctgttgcaatgtctaagctatggtctccggtttaggattcagtgttcgggctcttttttccaccaatagtaagtgcctcaaatgtcaccttacacttataactttccaagtcacgcttccttgattttgtgaagtagagaaatacagatggcagaaaacttcaactacataaaaacgcctttaacacaagttttattctatgaaatctgcatttcataaagtctttttggtgaactttattaagaagcaatagggtctaggaagcttggcaaacaatgaggcaggaagccccaaagagaacatgtctgtcagacatttttccttctgagttttccttccaaatgtttttggatcttgaaggaagtggagtggctctctgccaccactttcatacatctgtaacccactgggtgtacagagtctggcattcactttttaaattctctactcaatttcatatttatttcactgtgaaatagaaactgatcataggttaatgttgaagtcaaaatatgaatcttatttttgttagacacaatttccatttttgagaattttgatgtaagggctgataactccttaatttttaaaatgatatgagacagttcaaaccttgcattttatagaaaactgtggacctggtcaaatgttaaagctgagagtaatttagaactctgcttgcctaggttttaggactgtgtctaaaagacaatttcaagaccttggagaaacagatatagttactcagggtttcactcatgaatgtctactatcacttagcccccattcccttatgaccgtattttaatatttaatttaattctgctaaatgtatgttctagaaaatattgaaaggaaaacttgagctaaaaaagatggaacataaagcttgcataaatactcatctctagagagctggatcccttaaatctacttgctctttgaagaatttgtacagatgttgaccttttgatgggaaagatatagtgataatttattaaataaaatgtcaatcatttgtcttaattaaaaagtgttatataagggcagtagtattattttaacatacttgctgtcaatttgcaacttacatcacatgggacaaatgaaataatacacaatatacaaaatactacattaaccattaatagagtattattaataggaatctggaaaattatatgattagaataatactaactcctctttaccaagtagcaaaataatttcagtgactttgctgaaggctttacataatttttgaactcttagagttttgcaaagaagatcctgttattctcactttcaatataaggaaatggaggctcagagagttaataaaacccactctaggccactcacctggtagaggtactggactttaacttacactaggtaccaaagcgtgaatgtttttcactgcataatgtcagtctattgactagtaggaacttaggttataataatacaattatttatctagtactcattggaagataacttttttcttttaatatattaattaagttctagattaagctatcactttaaggaaacaaattgtagtttgctacaaatccttaggatgaagtagctcaacttctatcattaattcatgttgagacccaacattcacaggctgaggtggaaaaacctgaatgaatcacttttctctcagagacatgttattcagactctgtaaagttattccatagtggtttttttttttttgaaaactttcatgaccttctccttttgttctgtacatgccacaccaccaaaactcttgtaagctttataggctatttctgatacatgcatcctttcttagttctttagaaagtagctcaaaatcaaagcatgtaccattgactcaaagtcatcaaaaagatcaaatttgtgtaaaatgtattactgcatttataccaaatattgtgtaatgtaaaattcacatacataatgaaaattcttggataacttctgttgggaaatatatttactttgcttcaaaccactgaatatttaatcttgtttataagagaccatctgaagccatagtgtgtaaagtataatgcaataaatgtaataagaacaccaacatggcacatgtatacatatgtaacaaacctgcacattgtgcacatgtaccctaaaacttaaagtataataaaaaaaggaaaaagaaaacctcagtcacctaaaagatgctgaggtgctattttgaggttaatgaaaatcttggttactaagatatgagttgagacatataaaacaataattttccatcgttttcacaagaaacataaaagtaaagatactgcaacaaattatacatgattgatcagagaataaagaagataatgtatgaaaaaaataatgacaaggcagttgtcctcatacccacaaccccacccataagataagagcttcagtatattttcatttaggaaatgaggagtctcaggagcccagagccagtcacactgtgactgaacacttgaacttgaatttatgctatcactgaatgcactttcatgaggctttgctgcctttccatttctgcttagcatttcaaaaaactgcacgtgcygaatgttgaggtagccagaagttttcaatgccctgtttcaacagctcctcattcckcctctccaaaggagcttcagtctgtgatgctgatgctgcaccatggacctctcaggaagccctgakccccatcatatttgagggcacctctccctcttttactaaaggtgagaataggagaagcctaacaacttctcaaactgtttgaaaggagaataaaatatgatccttgtcattaattttgtatgaactcttatttagctagttttgatgcagccatatgtaaactttggtatcaggttctttgattattcaaaccacatgtgaaaactttcttctgtcttcagattcatagtgtgcttggaaacatttactattaatcagcagggacagaagaaagtgaatgctgggaacactttcacaaagtttaaaatatttaaaataggctgaattatactataaaataatgatatttcactaattcccaggagtgaaaaataagtgtgaaaaattaaatttatgcataatcaataaaacatagaatttccatatacagtagaaataataggaattgaaaaccaaaaaaactgggcatatcttacacagtttttctatctggactgccattgcagcagaacataattatatttggtctatagggtgtatgttttattttttacattttggctttaattcctcccaccccttgccacccaagcacatgccaatacttcttagatcactaatttataatttcttagttatcaactaaacatttgaatactttccgagtgtttataaaatttagttgttataattttcataagagcaaacacttattgcttatagacttgttcttgtaaatatgtttttatatatcaccgtgtgtgcatatacacatagccactgaaattgacactatccatatccaaatatatttgtcagtatatgaatgtgtctttatgtatgtaggtttatgtatatgaatatatatatttatatatggacatatttactattgttgggtaaatggtagtatatcaaagcatttttttttcttggagttagagctcttaaggggaagtaatgagttggccaaagagaaattaggaactgcagcaattgaggacatttgtgtatgagattggtataatgagaactgaaagaaaccactgaaaattgggtatgtatgagaaagcattgataaggtagactctccactatcctgcactgtttcatcagccttgtagttgatcgcttagcctgttctactcttgtctttgagtgtccttgtgactgtaaaacagtacctcaagtaagttttccagtgaccattttaagtttctaaatttcttcttaagtagctttggacagtaaaacatagtcttactattactggacaaaatccatgtaagtcagctgttgatgttttctctccacaagaactgaaaggagaccgttccagggcagggcaactggtggtggcaacagatgttgaggcctttaccaaacaatcatctctcatttttttcgaagtactcagcgttaaaaataatgtctctgtgtgtgtgtttctttcagtaccctgtaatacatgtagatgttcctgatattggtacttctaaaatacaactggaaacttaaagaaggatagaaaaatttaaatttagtcaatcaactaaattatcccaacacactgtatattctaaacaaatagtatgtaatgtttatcaaaattattacttcccagaagattctcttattaataaaaacttggaatatatctaaactacattatcttacaaaaatcatctttaaaactttgatccttttcatcctacaatctcaggaaatttgggttcctcatctaaaagaagaaaatatataaactacattagaggcttagttcacttataacctgtttgttaactattcctttgaggggaagttgaaatcaaccactgtggtttattatttaatagaaatttaaaatgacttatgaattttgtaaggaaattttatagacttgtttgagaacatttgtgttatagtttataatttcttccatcatttagtttatcgtatgctgagaagacctacctggaatggtccaagtgaagaaagataaatcattttcactcaaaaatgaaagagtggtatgaaatgaaatgaaataaaatgaaagaagaaattagaaaatgctcttcaaactatggaattagaatggatagtaatataaaaattggaatctaaatttttatatgtgctgcattatactgatagaagagttgttcaaatcaattttacagctgatgataaactgttatttagacataatcatatactttttttaagttggcttttaagtgagagctatggttttcaaatactgctccttggatcagcggcatcaccatcatctgtgagctggttagaaatgcaaattcatggacccagtctaacctaatgaattataatctctggagagggatcccaggaaatggctttaacaggttctacaggggattcatatgcacattaaagtttgagaaccactgatctaaaagtccatggctgaagggccttatgatctatatagcaaacagctgggaattagcagattgggtttcttttctcagttttacttgtagggcccttatttccttcttttagataaggaatctaaatttcctgagattgtaggacaaaaaggatcaatgttttaaagatgatttttgtaagataatgtagtttagatatattccaagttgttattaatatgagaatcttctgggaagaaataattttgataaacattacatactatttgtttataatatatagtatgttgggatattttagtgaattgactaaataatgctgctgaaatgaactgttaatatacagaataatattaaacataattgaacaacccgatgaattgtgttagagattagttttccaaatagaggcttagttcacttataacctgtttgttaactattcctttgaggggaaattgaaatcaaccactgtggtttattttttactagagattgaaaagaaaaacattgatttattgtttaagatggctgataaaggttgcatccaagtttagcagaagtgtgcaaatttttttctttgttttggtgtttcagtctgcagatgttagctgttttttgtgaggaaataatggtgttagctatgagttttcttggaaagaaagagcttaaaagctttggtgtgctggaatcacagtctgcacagccaaatgaacatggatggaatgttaggtgaagcccatggggagtcattcaacagcagcatctggaaggaaacaataagtgattggaaggtttacttttcaggcaaatgattaagaggcgattaaatgaargtgttaggatgtgagggagggaaggaagcactgaaggtgtatatataatatggaacagagggattatggaaaagacttaacagaatgaactacagatcacagctgaacttataaaaaactgaaattggaatttggacagaacagcttataggtatcacatgaaacagaacatgagattcatataatgcagaacatactgggaagcatttttctggaatagtaaaggacagtgatgatgtttagttattcagagycactrggcgtcatttcctagagttgcaaagacatcctgctattacacctttatagttttgctctagttatattggccctactttaaagtcctaagaaaacgctggcctttggaaatggaaatccaaggctttgatcaagtgagtgattttgctttagaagtttgataacttacttatactgcagcagtgttgatttaagttactttgaacaaaaattttgttttactcttcttgtgaacaatcctgtcttctggctcatttatcttgcccaatgacactttccactctcaattgtgaatgaacgaatgaattagtgaatacaggaatgaatgtatatattaacaaagctctatgcttagatgatataagaagtagtttattttttccttaaaggttcatgtttattttaaaaacaaaatgaagtttaactctgaatatatgcttttcttcttgatgctagacatttcagcatctggaaaagtgagaaattacagagaaaggtaaggcagcattatggaagccagtgttcttctctagccccagtccttcataatcatccctgagaggtcatttaatttaaatgtatggagattttgcaagcataagattcaatctctgcacatcgaagaattagatttaattaggcagtatgtctaaactctgtaacacacaaccccatattctttgtggcttataataattgcaggtgaatttttgctcaagtccagtgtgaatgatctggtcattccaggacccacgctccttcttgtgcccctgctctcctctaggtcatttccattttgctgggaaaagagaccataggaggaaacatccacttcctaccacttcactcagaaagtaacatgactttgcttcactccattgtccagaaataacttcaatggtcacactcagatgtggggatggcagcagagttttacctatttatgttcatagtagtctctgccagatagacttaaccttctggtcaaatctctaggaaggctcctctttttcttgattataaggaaatgttaagcaaattgggcacatttagaaacaaacaaatttgggcaaattaaataaaggactatatttgtagtatttgctctacactaaaacttaggggagcaaaacgttttcgtggactttttttggcgggaacaaaaagtctcatttaatttaatttcaataactctcctcctgtccagccttgctgcttatctgtctctttagactggcgttcccttagggtgatggtttcattaagtgcctctgagaagtcaaaatgtgtctgctaaaatgtgtcttagggttggatccatagctaaatgaaaggtatggaaatgcctactttcccaaaatggctaccttggggtggaaatcagatttagataaccaaaatcatagtcctggcagattatgaacaaggttagataaattatattgagatttggaaggagtagcagtttggatacttctggtcatggtggaatcattaagggatagaaggaaaattgttttaaagagccaaggagcagctcttggggtagcatggttgaaagcaaagttcctttttcacatgtttgcccagagcttaccctctggaaaagaaagtggaaaaagctcagtctccaggatggcccatgtatgggactaagtgattcttggagcagtggctctgcttatttgtgattgttattggtcatcatattcacatggaaggactatgagatctagaagcagagccagagacagtgatcttgttctgtcacggtgaaagctatggattctgatagagctggaatggaagtgtaaaatcattaagtctgtattctttcagagtaaatttatatagtaaatttaagtgggacaatcaagtaatttatggtcctaacaaggaccatatgagagaatatggggataggattaattaccctctgaaaacaggtataaaccaggaccacctcaaacaaacagagatgtataaccaccttacttttaaaaagtgatagtgcattcatctaacgataacccacaagtatttaatggccctcattttaagaagctttcatcctcaacctatagtttaaayttaatcctatgttaaataaagtttgacagaaaaattaaccttagtagggtaaccctttgcacatttaagttataaatttgcatgttagttttctatccttctggttatgcatttccagtatgttttagccttgcttgtcctacctataagatgtgctttaatcattttgcggacctttcctaattccctttctccatttaaatggagcctgaagcatgacagggttctgtagctagttttcaaycaaacctgagtaaggcaccagtatttttgacagacctaaacctaaacttttatttaagtatcctgtttctcacttgttcagcttgaggatagaaggttgtggaacaaattaggcacagcctgcaagtacatgaagcacttttaagtacagtacgggcaccagctgtactctatacrggcaacgtaatttattgctaacccctttcccccttgtatacggaaaacatttaagcagggctagatttaggtttacatggaatgagcaaatacacacatgatgtgatttaagaaggattagaaattcagtggccccagaccacccctcaccagcctgctcacattcccaacattagagacacctctggggttcaaaatatggtgtctctaaaatgaaataggtcacctggaaaggaaagtataataaagccggtagtaacctcatcagctgggtacagagccctaaagaaacaaaatacaagttttaattagaatcggggctgggaaaggtcagtgtgttagaaagcgaagccaagtgaggggtcagtgagtgagaagcaaactagatatggctgagagcagagctggggttgctgatggcaagcactgcccaggagcacagacgcgctgccaggcaaccagaagtgcagttattttggcgcaccagcctgatgttagatgctacaggcaggaaagcaaaataagttagtgtctggcttaaaggctcatccccttaagcaggatcagattaaagacaaccatatactttaaagcttagtggctggaaaaatatacgaataaatctycgtgtaagactatgtagtataaattagtgtctgtagatgaattctcagtttgggggttcttggaagtaaaatggagagagcaaaatattgctatcattagggtgattgaatctaactttataaagtgtgagaaagcttctaggaaaatatttagcagtattctgggggaagggaggaaagtgtttaactgagaagcaggttttgaatacatttaacaatttactttactttttattacatttgggactgtttccctctcgtaagtattctgactttctatgcattttacatcaaacttccaggagaaatcaagatgtaaggtacgcatctgccctgcccagcctgggagtcaggagacttattttgtcagggtgaaaagttaatgtactctcagcgtctccacttggccctcgtacccaaaagatcctaatctaatcagctgtcatctctcgtctagattatttctatgaactcctaatttttagtctccttgtttttgccctggcatttttcagtctattctctataaaatcccgagtgagcatagtccaatgtacctcagatcatatcatccccctgctcccgagcccactctctagtggctttccatctgcctgggaacaaaaatctttacccaggccctctttacacttccaataccaatttgctatttccttactccttgctcactcttctccatctaacactggtcttctggttcttgctagaacagttaacaccctgggcacatttcccttgatcaactcacagaacattgtgctggctgtccccttgaatagaaggctgttcctcaggatgtctgtatagctttgcagtcatccccaccacttatttcattttattctttgctcaaaacacaattcttacataaaatggcaacctatttcttattcccttagttcctctcctctttacttgatttctttgtttttataacacttatactatatattttaattattattgttttttgctattgtctgtaagtttgtgaagacagggacttttgtgtgtcctgttcactgctgtctgccaggcctcatcaaataaagtaatgatttgatgagctttttaatagcttatcaatagtcacaggtaagttgatgctgctaacaattattgcaacttttctccttccagtttagggaacccccgcaaagatcctgcatactggccttcagggtcaaaaatctttattatggccagtaataccaatggaaatgttcaactctacctcatcctgcccaaaagaacccccacaacagaaacatgtgtattccgttagaccatgggacctactgtttaaaagagcagtgatccaggcattcaatcttccttttgtcgaaatttcctcaccaaatgcagctcccattccaagtgtttgtgaaggcttcccttgaataactaatatgcaaataatgattctatttgtcttccccagagtgtcaagacacaccatgtatagtgaattcttgttagttttcaaagccataatatgaatatgaacatcctttattaagtggctgacaaaaagttcatcgcttctttgaaatctgattggatgaattgtacccatttatttattccataagtgtttactgagtgtgtgctatacaacaggatcggttctaaagattgggacacagcagtgaacccaacaaaatgaagcgccctcaaagggctcttagttgaagagaagatacaggaaatagacaaacaaatagatgcatatataacatgctgatgatgagtgctagaagcataataaagagtaaggggagtagagagtggagtttcctttttgttgtgggatcgttgttgttgttgttgttgactttttgatattttatggagtatttttaaggagtagagcccctgtaggcagtgaggaagtgagccacagatatatataggggaagaacagtccaacaggggcaaatgcaaatgctcaggtgttcaagaaatggcaaataattcagtgtggcttcaacagaggcaaaggatgagtgggagaaggcatcataaaggtggtaagatgtaagttcatggggcctccagggccatggcaaagactttggatttttctctgagggaaatggaaagttatagaggatattgaacagagaagtgatgtgatttagttgatgttttcaaagtattaggaaggctgctttctgccttgcagaggaggtggcaagagtggaagtagagagattgcttataatgttcttgcagttatccaagtaagaaataattattttaaagatagaacatgatctgctgatagatctgatatagggtatgagaagaagagaggaatcaaagatgagttcatgtgtatttccaaagaacaggaagtctgtgggagaacagaatgtagaggaatggattaagtatcagttttagaacaaacgccttagacctgggcaaggaggaccccttccctggccatggtgcctaaaggggtcctgtgtattggcatagcttcctctaaatgcctaagtccccctctactgcttggattgttctcagcatatttcattgcccttataatttgaatgtcccaaatattatggtttctgaaaattctgatacattttgatgtcaagtttttttcattgaattaactatagtggcaattagaatcactaatgtaccccaagaatgatggctaaatgaataactgggttgcttaaaggaatcgtgaartctcttttgcttgagggtgtaggtcaaytcaaaccttatcctgtgatgtgaatgtctaactattcatctgccagctccatattctgcaagtggatccacaatttaaaaaattttagatctttttacaccccaaaactatgttttgaagttacaaagaaactccctggggtgaaagaagaaattaaagcctagcttgtgaagaagataggacttttttgatactcttgcctctaagcatatgatgccaatcagaattattaatgtatttaatttgctttttacattagtatttttttccatgaaaacatttctaacaagtaactagctgtgccccctgtattcacttatggcattattgagccaggttttgaatacgagctctcatttatcctcatgttgaagtgagtgcccctctgttgcctctcaaaggttcaaactgaggttgacattgccaagtggaacaggatgggtggagttgatgttgtcagcactggaggtggataaaaatgttggcaggttccaaaatgggataatgtctccaaagtgttttgagctccttgctgaaagaacttgaataatttccaggtattattttgattgtggcaagagctgtgtaaggtaatctgctctactatcaacaatgattcctttcattgcaaattttaaacaagtagttatattttaaaatgataaatggaataatttaagttaccatttttgcaaaatatcagaaaaaaatgtcccatgtcttcaagttagccttacaaaaagggaagcaacaaacattgatgaagtattaactcatcaatgtgctaatgctttatatacacattctcatttaatccttaaaacagacttatgggctaaatgctattattattcccacttttaacagaggagaatgaggaagactacattattttctcatgttttctcatcagtacatgatagagctagattgtttgtctctagagtttttcatcaccagtctggatgccctactataccatcatttttttttctttggagacggagtctccttctgtcacccaggctggagtttggtggcctgatttcgattcaccacaacctccgcctcctgggttcaagcaattctcctgcctcaacctcccgagtagctgggattacaggcatgcaccaccatgccctgctaattacatacatacatacatacacacacacacacacacacacgtatatatgtaaatacatgtatatatatacatatatgtgtgtgtatatgtgtgtgtgtgtgtgtgtatgtgtgtatgtatatatatatatagagagagagagagagagagttggagttttgctcttgttgcccaggctggagtgcaatggcgcgatctcggctcactgcaatcttctcctcccggattcaagtgattctcctgcctaagcctcctgagtagctgggattacaggcacgtgccacaatgaccagctaattttttgtatttttagtagaaacggggttgcaccatgttagccaggctggtcttgaactcttgacctcaggtgatccagccgccttggcctcccaaattgctgggattacaggtgtgagccaccacgcccggcatataccatcatttttaaaacttttgtaagatttccttcagtagagctattggaaacacagctgctaaataaactaatgctttattttaggaatattttaactagggtatctccttcaaaattagtctctgtatccaaataggctttctttgaccaaattctagcacagggtcctacacayrttaaatgtccactcagtagtaagtggatgaataaataaacaaaaaataattttctgtacctattatttgtataatggtcatcacatatatacatacagcactatatgtggctttaccacaactstttttagctattgtaacctccattttttatagatgagtaaatgaggtacagagtggtaatagaatttttcactatactagggatggaaaatrtattttttattgcagaatagagtcaatcattgatagtagatacctgaatttagataatagtttctacctggatagcagatactggagtaggtagctctattgagaatgcctagaagatgcacctgtactcattgtgaaaaactgccatattgaattactattgtctgtcccgagtttgaaatggaggactggtagcattcatgtttaggattttaaatctctatgctacatgtatatgccctacagagatagatcactayggggttgtctatttgagactttagattctgtaatgagtattcagcaatcatttatcttttttgtgtgtgtttgtttgtttttggatccctgcatttttttaaaatgccccttaaattacttttataatttattaattcattttaattgagtttcctttcatatagttagaactttggtyagtcttgatacagtggatcaatgtgatgttctgcagaatgtccagctatttcaggtccctttgaaatatattatgacagacaataggtgaatgaayatagcactgagagaattctataaaatctgctgttgtctgtcccaagcaaattggaattttaatgctgttttttctttcaggtacagaaaagaaagctttcatccattggaggctgcataccatttaaataaggcagtgttaatttgcttttgcaaaaatactgcaactgggacagaagctacaattggggtttatttatggtagcttagtgtcatcctccaaaatcataacatctttctggtttgggtagaggctgtactggtgattagagggggttgctgatgaggccatcacccctgtatcttttactttctttagattcttgaggatggtaataatctctgctggctcacctaatatgctttcttcttctcctccccctcctttcccttcctcttctttttctttttttactatttcagctgaaggagaggagggagagatttcagaagcttctacttgcccttccttgttacaatagctcttacattacaagtcaaggaactaagatgcagtaaggcctgttcctaatactaaatatgttatttccaattatatactcagggactgagaaataaccacagggaataaggacccaggactccacttattatgyggtcctcctatttctcattttaacaatggggatataatgatactttgggtctccaagtgtcattgtcaaattgaaccttgtatccaagaatctgaaatttttggtattcttctttacccagtgtaaatttactcaaatgaatgcctatagatctctttggggaaagattatatgaattactttatatagttctcttagtattacaaggtcctcatcataaacatctggctgctgcttcagtcacttgtggtttwtttttttttttttggtctgaaaattggctaagatgtatagactaggcaagggatcatgacttttacattgaagcagctaaccaaagctaattgatgagctatagccttcattaatttttattgtataggtcaggatggcttaaccttaacactatggattttggatgtcttctttgttgtggagtcctgtcttgtgcattgtaagatttttaccctactagatgccagtagtgcccagcaattttgasaaccaaaatttctccagacattgccgggtgtcccttggggtgcaaaattgtcctgaatgagaacgagtgaatatgttaataattacactgctgcaggttgccagggagtagcaatatcccacytacttygaagaatatgaaataactgaaaattaaccagcaactcatctagctcccaaatcccattttggagaccacttcctcagttcactcctggcactaattttcttaggtctggttccctgggaacagtctcctggacaaggatttgtttgcgggacgttattgccattggattcaataactgtggggaagtaaaggatataaaactaggtagaagaataagttgaactatgatgtactcacaacagaggcttcagtgagtcacacaggaatcccaggagctgatatggcctttccagttaggatgggggcatgaccttggataaagtggcgctgtagctgagggtgattacagaaaaggggcccagtgaaatgccatcagctgccaaaactttagtttctgagaatttctccaccctaggagtacctgagcaacatctcacaacatccgctgtagtctattaatcagaaataaaaatttccaaaggtatagatttcacctaacttcactaggatatggtaacatttttctcaaccccttctgccacctttagcactcaataattcatctccaacaaatataaaacactgttcacrtatcaagaagtataagggaccatagattgttgttttctgagaatttttgttgtgtgtctgtagtcacgcaaatgctcatttttatttttgccaatcagaaaagaaacattacataaagctgtattttgatggaagtttcattaatatctgaaaatttttatttgaagtttgaatggatttgggttgatgactgtgtggatgactgagtagtcttactgtgcttaatagagtgtattataaagctgaaaactcatagcacatcactgatgtgatttcccaatttgacattgttatataatcaatatggcataacaaaaaaaaagtaatgaaatttgattgctttttataaataataacagcctcaattaaaataactatttagaatgatgaattatgtcttcttagctaaatattaaaccaagtgtcctcagctaacacactgctatgccatcttaggagtttgaacttgaaaactctgacaatttatgcattttaatagtttccttcaactttgtggctatcaggacatgctgctggtataactggcttaatatgaatagtttcattttctattataaaccgtagttttcagaaatgtatcatcccagaaaatatttccatgaggaaacttggcatatcacaattttatcccagaaaattaagctttaccaaatacacacagacacacacacacacacacacacacacacacacacttctgtatttgcagggggcaaaaacaattttcgtagttttcaaaataaattttgggactgacagcaaggtgggagagtgtgagatcaaacaaattttgttggtgaagacactaaggagaagaaattttctatataaaatatttgaagtcaaacatttccttttgattttcaaagtaacacttttattactatcttaaccttcaatatagcaataatgattgtaattgtaatgaaacacctataggtcatgttggctatttttcatagtttattttgtttcaatgttaaattgccatgaatacaagaataaataattttatttattaaaataaataatgtaaataacagccaccatttaaagaagcattatcatgtttacagcatcttgtgctctatcaattcatagaagtttttctgttttgaattattttaatgctttattaaattcttgcattaaaaattcctattcttgatttctttgatttttttcttcttacatgtactttgtctcatttttgttttttctattattttgttactatccatgttttataaacttaatattcttcattttctctattacttaatattctctaatctacttactattatctattttaatctcatattttctatttcctctttcatagtttgttttattcataatgtagttttatattaaaacaataattaattgatgaatattaaacacctggctgcatttattgctsaagctacttttaaaaaaatggaatttatttaagtagtaagtgaacacatatggtaaagatgctaaaaacctcattttaaaaatttgaataaacaattttagatgatcttaccttgtccatctttctactacatttcaatctgtcatatgtggcaaatgccccttgtataattttcttttgcttttttgtaactactcttgattgattcaagtgttcatgaaatgtatataatgtatatatttccaggagaaacttgtatttatttatgctgtatgtccacactgatactctgtactgattttccattgagttccaagagttaatattaggatacatatacagagagggcttttatcatttctagakcttgtttttaatctctcctaaagcttttactgaaggctgttgaaaacaaagtgtagcacaattctccacttctcttctggctgttcaaaaactgctaaaaagtaagcagataccttcctttactttttgatgtagtaagttaagacatattgtttattgagtcttagatgacataatagtacattacaaacttatttttgcatggttacaaataaatttttattaaactgccaaagattgcctgtgaatcaacgttggcacataggtattctgaaagaacagtttcactatcagctttgttgagtcacctttccattctagagagatacccaggaagagaaatgtcttttgattgctctggatgatcaaggtttctatggatatctgctatataaatgataatagtttgtatttctcattatatttgattaaaacagaaattaatatctaaaaagcaataaatagcagaatgtggagagtttaacattaccacaaaatgcaccatgtgcatatttcaaatgagacaacaaaaatagattttcttggaaaagctgatctctaatgcccccttaaaaagcctaatttaattttgaaagaaagtcacacaatttcctgattcagccctctgatctgtgtaataggaacatttgattggaacatcatagcagttcttgggaatactggctatgaaacagaatatttcaatattcataaagaccttatttacacaaaaaaatacttctcaagaaatgaagygcatgaaacataagcaaatatgtctggaaatttctastatagatgatgttattttcctaggggaaaaaaaagcagtacttgtagggtgactaataagcaatcatatctattaccattagaagggttgattgtatatatagaagtcatccattattactgctgagaaatgtgtgtgctacacacaagcatacacacgctggcatacacccacacacactctaaatatttcagagaaatccccatcaaaatatgccttccatttaattttatgtaagattgaaaaatgtgagtgaagcacattacttatgttctgtataaaagaatgattcattattattttcttcaaccataactcaatagttggtgatgtatttaatcttaacctaaagaaaactagaataagagccagggagcttagctgggtaaacttaggaagtcatttaatctctttcaggtctgcctacctcacagagtagcttcacagatgaaacgcagatagaaaagttctttggaaaagtaaagtaacatataaattcaagatagtatttcttttattgttactctatgaaagtgaaccattagaaatctgatgccaaacgtgggcatacgctcagccataaaacatagccttttgaaacattcactctggataaaacatcttttgttttttcgctagtatcatatactacactgcacattaaacaggatatactgagctctgtaatgtaggacattaaatgctataaaaataaatttttagactattggcctgtttaagaagtatgtttctaacttctccagactacattaaaatgcaacacaattccttgtaacttacaagtcattcgttaattttcatatattcagtatgtaagaaaagtgtccctccccatccctgcctcacagttgcttccagatctctatagcactaaaatgtaagctagttatgggcaggagttttggttgaatgattcacctcctatacccaataactataataatgctacttagcatgtgttagctaaaagaawgttcaattttacttgtccaaattttattcattcatttagtcaaacattgatcaagtgcttattatgtatccattttgataactctgagggttttaataaaaaaggagaaacaggcaagcaaagaagtactcatagatatgctttaaaataggcttctacaaaacgttatgaaaatacagaaatgaaataacttaattccatctgcggaagtcagaagtctcttgagtagatgacaaattgaatcttggatgatcaataaaatcaataaaatcaataaaaattttgttgaaaataattggatattaatggagttaataatagtattgaggaacaatttttatggaacccttgcttatctgcatgttttattagcaaggcactgattgcctttctttgagaatatcttttcaagaatgtttktctagcaaacagccatagaaagagagatagtatctctctctaaggcaaagggcaggtatgcctacagcccattatgaaattctgaggttccccaagtgcagctcctgcagtgtgagccattgcatatgctggtgttacctggtcatcctctagtttctcatttttaaatgggttgcctttcatacttgttgactatgtgtgatttaagagccctctcttactgatctttagtctcttcctgagcattactatctctgtattgactttttttttctaatgagcttagatatgcacaaacaatgcctagtaggcaaatccaactaaatgttatacaagcacgtagaattcaataattcaaaaataagctcattatctccccaccagaacatatttctccccagatattccccagtacatgctgttccttaccttctatcttacacttatatataattggaccatttattactggctctaagttggcatataccagccccagcccaatgcatgacatatggactgtactcaataattacttgttgatcatattggataatttcttctgtcacttctgtcactggcttaattcagatagtctagaaagactaaatagtaacattagattcaagaggaatcaaaaacaatgtcaagtgaacacatattctgctttgattgaaatggccataattgttaataatcggtgatttaatttcttcagattacttgttaataatgccagctacaatacattgatgcaaagaaaggtcctcaattcttcaactgtattcaggaggcatatggttattaccttaaaaaacactacgtacctttctttttcttcttcttttttttttttttggcaaacattgtcattgagtaaaagaaaactcttctgccatgtatgtgccaagctaattgttgttgaaatgcagtttcaagaaacaatcagtgataatgagaccacatggcttaagattgcctagttttgtttttgtttcattcctgccaactgaagactagaggtaataagaaagaagagtgagcttttcttatttacttcaccttcccatgtcatatattttatttattgttctgttggaattataggcatcttgtaaatcaggcatgatttcatgttgtcatccaaatggagtttaaagctgaggaaccccaggccttcctctcatccctccactctctcaggttaacttcatgcatcacaacctgcacagaaaatgcagaaaagaaaattctttttcttctaggttgctttttttgcttattgaattgactaatttcatggaaattgtagagagtggtctgtaaacattgtaatggggaccatctgggttcttttgctgatagctcagaatgctgataaaaccaataacagctctggaccctaaaaatggcctttgaatattttttgttccacagacttgaatttggctctgcattcaaaacagccaccttacccatgtatgctttaatttttacaaggacagagtgtgacaatataaactggttggcttgaattcatcattcctgataaaaggcaaaaacaagcaaacaaaaacttttgaagtacaggttctgtggttctgggctgattctgtcaactatccacttaaagaacttgaatatgggttacccaaacttaactcggctcagaggtaccaagagattatgttggtacagtctggaaagatggagtatgcttctgactttaactgcaatatacaatttcaaaggctgtttcgttttcccccgattttaaataacagccttctaaatgggcatatttagaaggcaaatatatcttctaaactagatccatggtacctagtctgaaaccagaggtttcagaaaccagaccatttgccatctcagattttagcaaaaggtagaacaaggggtttgttacatttggctggagctaggctgctcccagtgggttattgtggtataggttccactaggaataggtctgtctttcagggagcgacacttaggtggtagctgtgctgtgtgacctagagaaaaaataagcagcaaattgtcttttctagcctcagttttctgggcccaattcccaaaaccaaattcatattcaagttcaaggtagagagggtggcatcctgtatacctcttcatggaagtagaaatagtcttttaacttaaagagttatttatttatttagacagggtctaattgcgtcacccaggctggaatgcagtggcacaaccactgctcactgcagccttgatcccctggactcaagcaatcttcccacctcagccttccaagtggagtagctgggactttaggatacaccacccccatcacgcctgactaatttttgattttttgttttttttaagagagatgaggtttcactatgttgccctggctggtctcaaactcctgggctcaagcaaatatgccttggccttccaaagtgctggcaaaaaaaatatatatataaatatataaatatataaaaaaatatataaatatatatgtaaatatatatatacacataaaaatatatatattatatatgatatatgatatatattatatatatcatatatgatatatgatatatatcatatatgattttatattatatatgagatattatatatcatatatatcatatatattatatattatatatatcacacctgtatatatattatatatcatatatatgatatattatatatgatgtattatatatctatatatgatatattataataatttataatatatattatattatttataatatatattatatattatttatatacacttataaatatagtaatataataacaatctaataccaatataaataatctaaatatataaatatataaaaatataaaaatatataaatatatgtatatttatatataacacatatatattacatatatatgtaatatatatatatataaatatatgtatatatattttttgagatggaattccgcactgtcaccaaggctggagtgcaatggcacgatctcagctcactgcaacctccgcctcctgggttcaagtgattctcctacctcagcctcccaaatagctgggattataggcacccaccactatgcccagttaatttcttgtatttttagtagagacagggttacactatgttggccaggctgatctcaaactcctgacctcatgatcctcccacctcagcctcccaatgtgttgggattacaggcgtgagccactgtgcctggtcaagatgtaatttttaaatgaactctaacagtagttagtttattgtcatatgcggaatcacccaacagatttgatctttaggtcctgagtaaatcaattattcttcaattatattttataaattaatcttttgaattttaatcataactagactaaatatcacttggttataaggaaaaaatacttcatgttgcaagtaatataaatagtgcattttcatgatatcattgtattgatttttcagtattttaattctctggggtaagagtataacaaagtgcagttgtttaacttttcaaataagcaaatgtaacaatctaaaagttacgttatcttgttcttacattttgcatttcaggaaacatcccagttatctggactccctgagtttgttaaaatagtagaagttgggcctagggatggattgcagaatgaaaaggtagttttacatcatttacttcaaatgctgtctacaaattaataaatttaagattgtaaagatttacatggatttcatatgttatctgattatattttttctcaattgctacttgaatttgtaaattacaaataatactcactttgacttaggaagtaattttctgtttgtgcttaaataggacctayacaatttacttataaaatattttttgttttcataggttatagttcctacagatataaaaattgaatttatcaatcgactttcccaaactggcttgtctgtaatagaagtgactagctttgtgtcttccagatgggtaccacaggtatgtaaacccacaatttcttaattagatcctaattcaacttcaccaaaaaatatttggtaaatactgtgatattaacttgatataattactaattttccatattctttcaaaatattaacctgtgractgtgatatgattaaataaaaaccctttgatgaagtcctacaagttacttagaactttatactaagcctgtgtgagtatggttcaatataatgaataggggacaaggccgttgaatagcattttagggggtctgccctttctttatcattttatggctgactttctaaataatctgaacatctccaaatgcattagtcattttgtctgttagaggcaaatgataataagtagcctgatagcttccttctagaatcccatattgaagagtgagaaatggagacacatactccttttactttgctttttttgacacttgtatttgcaacagggatacgtcatcaaatatatcattgaagataaagcagagagtcatctagaattttgccttgaaagatgatgagagagctttctctagggttttcaggcatgtggcagcagtcattacttctgaaacttgactctgatctttgaaacatcactagtaattagcaaccagtaaaacactcttcctaatccagtgtctgttctcagtccttggatcccttaatttctccacagcacttagtttcactgactactcctgatatcatttccttggtttccattattctctattctaatgaatcagttatttccccaattgctctttctctgtcatctctgacatctttcatgacctcttagtttaaggttcccctaagattctgttttcagtgcttttctctgcctatcctctcttctttggctgtctttccaataccaacagtcatttgcatttctagtgctgccttccctgataaacttcaggtggatgtaccatctccacctcaatctcactgggttaaaatcaaactcattgtccaccctgctttatgccaggagtgcaaatctttcctttaaaatctggattttaagagctgactttgtatccagttactgtcgtagtcasttagggatactataacagaatagcatagactgggtgacttaaacagcaggagaactatttctcacagttatggaggctgggaagtccaacatttaggtgctggcagatccagtgtctggtgaacacccacttccttatttgcagatggtcaccttctcattctatcctcatatggtggagagcagagacagggagcacactcatgtctctccttatcatgttactaatgccattcatgagagctccacccccatcacctagttatctcccaaagatccttctttttaatattatcacattacaggttaggatttcaacatattaattttgaggaggtgcaaacattcagtccataacagttactgatgtatgaaatgtcttcttcttcagtatggcctacacctgtgtcttcttttcagtcccattgatacattagtgatccaggtcctcattaaataatcattacagtagtcccttaaatggtatttataagcactgtttctccattcgtcatactttccttgtaaaataatcttccagaattatcagctttcacaaagtcatattttccttccttcccttccctcctttgcttccttccctccctccctccctccctccctccctccctccctccctccctccctccctcccttccttccttccttccttccttccttccttccttccttccttccttccttccttctcctcctcctcatcctccttttctttctttctttctttctttctttctttctttctttctttctttctttctttctttcttcctctttctttcactttaggggtacaagtgcaggtttgttacttaggtaaacatctgtcacgggattttgttgtacagattatttaatcacttaggtcttaagcctagtatcctttagttatttttccttattctctcctcctccccccctcaactcttccatacgctccagtgtgtgttgttcctctctatgtgtccgtgtgtcctcatcatttagctcccacttatgtatgagaacatgcagtatttggttttctattcctatgttagttaatgtgctagataatatgttcgataatggcctccagcttcatccgtatccttgcaaaggacatgacctcattctttttatggctgtatagtattccatggtatacaggagtacattatctttatccagactatcatttatgggcatttaggttgattacacgtctttactgttgtgaatagtgctgcaatgaacattcacatgcatgtgtctttatgatagaattatttatattcctttggttatatacccagtaatgggattgatgggtcaaatggcatttctgtctttaggtcaaaaagtcacattctaagttctttaatggttcccttcctcccattgacaaagcctggaaactttggtttggtattcaagactgtctatacctggccacgttttttccttcttagtgttaactgtattactttgtggaagctactgctaaattaactgtttcktgtcctctatttacatgtcctgcctctttgtccatatagcactttacctgtacttgcttatgtgtatctgtatttctgcgtttctctgcagttagaactcaattagatagaaaggcttaaaacattaaaggctttttarttgtattacatttgaagtaacagaagccaaaataggattaagagtagtagtaatatgtcacctttcacagagggtgacttttatttatcctcaaaagaaactaattttctctatcccattgtcaytgctgtttatartgtgtgtgtgtgtgtgtgtatgtgtatatattttgttttgattagccactacctataccataagtattttaaaagtagtgatcatgtatcgtttatcttctacttatcactgtacacccatttctcagtacatagtaagtaggtgctcaatgtaaaataaaaaaaataaatcaatcagtctgagagaacaataccatattactttcaattctctggcatcggcaattgactctcactttgttcatgtatttggtcctgtataatgaaggtcacaaaactattttttaggaaaacactactagtttgattaggctaggtatatttccttgaaattgtcaatttgtaaaatgctagctattatttcactagccaccattaattttaagagagttctagacatttttattrtctttatatcttcataaatttacttctgtctttaatacagtctttgctaatttcacatatttgattattgctggagagaaactgaataggctgatataactttagaattagtgttaggaaagataatagatttcgctaatattatttgatgaatattgaccaactaaagttatatttcaggtacaaactgttgctagccctctttgaaattcttttttgtttcctcagtggttttataaagctgcctacaaaatagtctttcctatagtaatgttcatggccaccttctagtattatgcaagagtggaaattgatgatagatttttaaaaactgatttaggacatactcagtgacatttagaaggataaggcagaaataatttttagaaggctacacttcttgcatagctagttaagagaaaagatggacaaaaggaaaaaaaaaggcagtccctttgtgagaagtaattggaaaatgcctcctgaccttacattaagtagatacatgggataggactataaaatgataygatttattctaggtttgttcccaagttgagtttagggcttaaactattcaaatttaatgaactcttccaaggctcaaagtattatcgaataagtgcctgaattcccccacatagcttttgaggacagctgtggtgagaggaagtgcttccgaaattgtgtccctgttcacattctgccttgaacttgagtaagtgacttaacctctctgaaccttggaaatcccagcagtgatgcctgcagtatcagagtgttggagattataaggcacgtgaatggtccctgagtgtgaatgcccacagtccaaagcacctgactcctgaccagtgctcagtactgttatttaagggaatgcctgattagtagacatactgatggatggatcttgggctctacacaagttcactgccttttctgataactagcctttattctgaagattaaagtatgtgtatagttacaatattgagttgagctcaagttgaataattgaagatattttgcctttcaaatgctaaaggctatgttatatattttactttaatattcatctagttatatacattccaattttttaagtggtttaaataaatcacatacttgtaaaagatcagtgtgcctgaatccaagacaggaaatttatcttccaaagttgtatcagtcacttactatataacacattaaatgtttgtcaaaggcaaatattgaggatattctacttttccaatttgattttagatttcagggagcttgtctgagcagaccattttaaaatttctcttttgaagtttatattactctcttattttggaaaaaaaaatcttatgaagtcagacttgtctaacttaacatctgagattttgacgataattttagtacaacagcttayatatatattggttgaaataatttctacttttaaggacaatgtgtgtggatctaaattggtattctattaattctctacatcttatatttttttcctcaaatgtaggtcatgggaatagtcctctagttgatgtttagattgctgcttgatcacttatttctttttttaggattttaaagcttttttacagtttccctcctactgttttgtttggcaaagactttctaactcaaacagctaaaagaaaagttccacagtagcagggtgccatataaaacaggatcccacacctataacctgaatggctggagatgataaaatacctgtcattaaaaaatacatgttctttacaacwtattctkkamaactttccttagagtgacatgaaatataagaacatttgaaatgagtccagatagcccctcgctcagatggaatgaacaatagcagcagaaagaaaacatgtttataaaaatagataaagtttattgcaacattggaatgtggccgttagtagtaagctatttaaactgtaaatacaataatcttttaaaaagtgaactagagttttacattcatctttagtttagccatttgattgtaaatattttattcacaagtgattaaaatgaatatcacttatttaaaaataaaaatacattaaatatacataacattgtacatttatgtatgccataggcaaaggcttagtttaaaaatatttgctccctcattagctattttttaactgttggaatagatgggtcacaagtcccaacaccagggaataaaaatagatttttttaataaaagtagaaagaaatgtatgtaaaagacaaataattattttcaagtcactctaaaacttaaaaatatggaccaaacacaatgttagcaagaaggaacgagtaaattacccctactctccttttggtgtgtgatacaagtagctctttattggcactgaagacacatttactggattgaagtttaaaattcagatttacgttgatgagatgcaggaggctataccttctgctaccaagtccagtcctgatgtctcctcctagctcttttcttttgaggaaggtaggtatggaaaagagtcaaagaaggaggtaattttgacgaggtgtatgtgagggtgcacgaaggggctgaaagagagagtgagaaagaaaggaggcagagagcccccaaattgcttgcttataaggtacagttcattcagaaaaactttccatttgggaaattttccagagtaagactcatccattattatccagatgagttggcctctgtcaccttcccaaagaggttcctggtgaaatttaccaagatcacaattcttattccctggtgctataggagtcctttacccagacaggtagaggagaggagaatgttggctgaaagagggagggagacttaaaccaaattatctccaaatgagcctgacttaaaatactcaattctgtgcatagaacactattttcttctgcacactaagatgccggcatggagatcaaaaccatattatgacccaactctcacttaattgatgatctactcagcaactgtgggtcttccacatatttttatgacagaagtagatctattaatcagttatcctagagaatcagctgattaaaatcactgagaatatttattggtgaagtcttcatattcttgtcttttctcctgaattcgtagagcaggtatgcacactagtgttgcttccttataagagttgtcatggttcattttctgtttctaaatatatgaggctcgttctgtttttcaacttatataaacacgttgaatttcttatataacaaataattgctgtttgtccaatatttggtctcagagaaggaatgaagacacttagttctttagtaaatgatctcaaatggtcattgaaatttaaatgtaggtaaaattgtgctctgagagctagatccacatagataaaatatgttagctcttcaagaaaattgagaacaagcatacactatttgccacctcatttttttcccagtacttaaatggcatgaaccatagactccacattgcttcaatcggtctaacgtgttttcactgactatgcagcttgtgggaaatattttatgtgtttgtgcaaatgtatatattcaaatatatgtaattgctacatatccttgagcgttagtaaatttgtgttggttcttcgattacccgcacaccaaataatctttaaatttaatggcttaaaacaataacaacatttgtttttgcttatggtatttgtgtatcaagaattcagtaatggctcaattcagcatctctagctagaggtttcttaggtactcacaatgagatagacagtggtcagagctgcaacagcaggggcagggggcttgggcagctgcaggcttgctgtccacctctctcttcctgtgttctcaaagactctccacgtggtctcctgcaggggctagtttggactttatcacagcatagcagctttaatctaacataaatggctcagagttccaaagatgagtgtcttaaggggtaggcaaatgtggtatggcttttataaccaagccttgtaaattttatagcattactttttcataagctattagttgagtcagttacaaagcccaccgagtttcaaaaggaggggacagttaccacctttatattgggtcacagcattctggaagagcaagtgggaggggaaataccactgaggtctttttataatctgccacttttatgtttttaaaactggcctaataactaacctaattatatgctttttcttactaatagttaaataataagtacagttgatagataaacaaaaaactcccaaattaaaaagaatacctattttagtactgtcatggctacaatacttacctcactcctatccactccctctataaaattaatttcttttgctttaaatgagattaagaggtgttgaaaacagtgaacacacaccgccacacaaatcactgtctttactgtagaatgaaattatgtccctgtatttctgaagctgttttttatgtccagacctgttcatcaaagtcctaactctgtactgacatcttttcagagtctgttgtaacttctttttttttttttttgagacggagtctcgctctgtcgcccaggctggagtgcagtggcgcgatctcggctcactgcaagctccgcctcccgggttcacgccattctcctgcctcagcctcccgagtagctgggactacaggcgcccgctaccacgcccggctaattttttgtatttttagtagagacggggtttcaccgtgttagccaggatggtctcgatctcctgacctcgtgatccgcccgcctcggcctcccaaagtgctgggattacagacgtgagccaccgcgcccggccgagtctgttgtaacttctatgacacgtctggaatacacacatcattcagttctatatgttaaattatttatgaatacctatttgcttttgaaataatacacactaggaggatctcttttcagagcaaaatatcaatgtactctagaaatgaaaagtagcaattagatttttgttgctcttttgttagcacaaacacccagaattattttaagttgccgtgttaaatgtttctctaaatttgcaaacttatctcttattgaatgaaaataatataatagtacatattttggatactaaaataatataataatagtacatattttggatactaaaataatacaataatagtacatattttggatactaaaataatataataataaatattctgaatactatcctagacactctataatgtggcagtatatttgatttatatcctatacaagtgttacttatgtaatagtggtattatttactatatctttacaaatagtgatgatataaattcctgaattcctctggttaagagtgggggctactaatcaattcctgtgtttttaagtagggattaagttgaaatgcaatactttaaagctgttccactgtacaattaaatcattgytactgttaccacataggagaaacaattgcccaaagcctatttataaatatttaaaacactctttgtctcgctcaaaaaaagaatatggaaatgttaacactgtttttgttgggatggtggaaactattattattattattattattattattattatwtattatgtttgagacagagtcttkctttgttgcccaggctagagtgcagtggtgtgatctcagctcactgcaacctctacctcctgggttcaagcgattctcctgcttcagcctctcaagtagctgggattacaggtgcccaccatcgcacccagctaatttttgtatttttagtacagacgaggtttcaccatcttggccaggctggtctcgaactcctgaccttgtgatccacctgcctcaggctcccaaagtgttgagattacaggcatgagccactgcacccagccactattattttttctctttggactttttttaaggttaatatgcaataaaatgggggaaaatatttgttgctaacatcgtttggtattactcagcattcaacaacaacttctactgtacctgggatgtagttccactactgtatcctaagaaaaagcaaaatttataatgaaagcaataatgtcagcaattttattgtttaatatgctcatattttcaagcagaacatataattcaagcatttttgtcctttttacccccactagctaaaaagtattatactcgaagattattatgctcagcatgtactacttttcagtaggatgataattaatttgctcaattacactttgactaacaagttgggttttctttgttcttagatttaaaaaaataaccaaaacataatattaaaataaaatattctacttcagaggtccccagsctttttggcacaaaggactggttttgtggaagacaatttttccacaaacggggaggtgggaggtagtttccagatgattcaagtgcattacgtttactatgtctttttcctattattaatacattataatatataatgaaataattatacaactcactataatgtagaatcagtaggagccctaagcttgttttcctgcaactagacagtcccatatggggatgataaagacagcgacagttcatcaggcattagattctcatgaggagtgaacaacctagatcccttgcatgcactcctatgaaaatctaatgcagctgctgatctgaccggaggtggatctcaggaggtaacatgagtgatggggagtggctgyaaatacagatgaaacttcacttgctctcctgctgctcaccttctgctgtgtggccccattcctaaccagccacagaccagtactggtctgtggactgggggttgggtaccactgctttaccttatcttttattcaattgtattgagttcatcatgtttgtcaattttgtaaataagtttttccatgagaaagagaaaaaaacctttcaaagccgtgttggtcacattaaaattccacttttgtatctgactaaaagtaccttaaaatttggtcttgtagaactgtgtgcatgcattgacatttgaaaggtctgtatgtaattgtttaaaacccaaatagaggtccagtatggctcagaaagacttgattctgactctttagtggtcttttttgcattactgtgattagtctgttgataaacattgttgatattattttagtgcaaactcatttcattgatatgactcccaagccacttaagtgaaatccactttgggaaatgcagagtatgccctagggactagactagagggaatgaaagtatttagtaatacttatttccagtgtgccatagttacgacttgctcacttggagattcacatccattactcaaaacctggtttaaacattaaagcattaagatattaagcgtagtctggatagcccagttttgagtatkttctagcagtacttattttcaagaatacattatccttgtatccttgagcacttaaaatgaaacatatcatagcagttatttttaaataattaggataatgcgttttaaagacatacgttttggctgatgttcataaagagttatgttatttgaatattttttaaaaataaaaataaagtgatttttctaatttttaggtacacacggattgatctaatattatctgattaaattgctggaaagttctctagaagtactatttagtaaacatagagacttagaaagataaacatgaatgccgaaagtaatattgtatcccgaatatcacattagacaatggattttacatgtcaaaacctacacattagtgaaatgtatatatgctaatgtttcacttgttttacatttgataaaagaaaaagaatatacgttttttatttagagtatgcctgtaaatcaaaaacatatttcataaaatatttgattttattttgcttttaaaaattttatccaagcttatttatcttgaacatttgacctatcaattcatcactgattggaattataatttttagaatagtagaatattttataacatctatggatattaggtattttcattgttaatatataagatatattttgaagaatgctatttattttataaatgtcttggacaaatttaaatttgtcattgcaaaaacttataggttataattaagaactttgaaatatcaacctgttgaagcaaattcatgctaataaccttatagcactaatactacttacttcagaccttcttatactgctataatgtgtaatctatttataaatttaacactattatcagtcaagatggatgcatcttgtattgaattctgcttataatacgtagtaagaaatatatttctagtagcccaaatatagtcatccacaccccgccccccaaccccccaccagatcctccaggtttcaggttttctgaggtttttatcactttttctgtctgtttaacccatgctttctggtagagcaatacaaaatctgagacctgactcttactcatgtatgatatgatttggcgaagtagtttcatctctctatgccttggattgtttccatttattcactcacccatttattgcttttattgtgtctctattcaaaactgtattgagttctctgttggacccaaatgttgaataataagtagttgctatcgataaccataatatatacctaataaggtaagtgtaaagttaaaatagataattggaaaaaaataataaaaaaatcaaactcatacaaatggcgttttaaaatcaagtgaatatctgtaaatgagttataaaatagaacttagtaaccagggtatgttaagcagtttgtcatcgagcactctggccagtttttttaaagttctgtcttatatcaaaacggagatctccggatctatatgatggccaaaccacaaatttgcagtgatggcattgcttgttgtggtaataagaccctttttttccacagccagtgtcttattacttatttccagtgtcttattaccagtgagttagtctccttccaacaacccaggcctaccctccactctgtgcaagttggcttacagaaagaagtgtaagtataggaaggaaactttgtttacagtctgtatacagtaactacaattagatacagtatttcaaaaatcacttctgctttcatgcatgggaaataacaactttgacagtgttattatcaaacataaagacatgatatatgagaggcagcacagttgagtggaaagaaaattatactgggagctttgagacttcttgccctacttcagaatgatgttgggaacatgattgttttgacatgggaagaccaggagggtggtcacaaaaggcattaacctgaacaaataataactaatgcatatttattatgtttatcttaggaaactaggaaatgctattgaataaaatgacttttatttctttatctggaatattggtctctcagtttataactcacagatccatttgggtagcctgggtctattttattaatttaaaaaatgaatacttgtagacattagtggatcatgactcaaatgtcttgcctgcatttayaatagaagagtttgggtcatatgcttcctrttttggtcactcttgagacgtgtaggcatttcaccccatagagggcagtacagaggtccttagtacacaaaggtaatgctgaataaggaagtacaggaaattatacacaagaccaagttagtttcaaggcttctggacttaagaagttttgtgaatatggtgtcagtctattttagctttggcagccaagacagggtattgggtagaaaaaaaaaaaaactggatgttcaattttccagagatttcctgtgtttattattgtaagactgtgatttattaaaactgtcttacttcttcaagcagaccaagatctcctctgtgctactgaggctaagatatatggggtttgtgcaaggagtctgtgaatgagacmgggttactgtacccaggctacagtgctattcataactggctacagcattttcacccagggttgtcaggaagagctctagtctcattttttctcattactgaatttacgaatgtatcgcctttaagaggagttactgctcaaattgagttttgagttatagggtctgaaaccacattatttacatttttatagtaatcgatggcwtgtgttgaagaaattgcatgctctatgtctctttcctgttgtacgcctgcatatagaaagtaatactgtcagttatgtctaatccagctactggagattgtagacagatagcttctgacattatcysctcattttgaagagataatgaatattgtcctggattatcgatagagttggtggtggggcaaagaaagcaaagtatccttcaaaaatatatttttaaaattatttagcaatctatattagtgaaaaggaaaaatgagggcttataggtccatgagtttaagtcttttcctagcaaaatttaggatagttgattaaacagagaatttatgaacatgagatgtactcggaaatcttatggatgtaccaataaaaagacataccaaactgacctcacttgtttgctgatagtatttctggagtatttaaaaaatatccttgactatcttgttgatatttctctgagcaagatatgaaattttaccaaaactggtatttttccaaactttagtttttatcagtgaaacttttttcttttttgtcrtgggtaaaactttatgtagaacttcaatatatgatatagacaagaaagtcaccataaaagatttgttgaggtcccttctaggctgtaggagaggtcttatcagtgtcatcatctgttataagttttaacgaaattttcaatagatatttttgtgttctttttcttaaggaggccccctcctaaattgcagtcgctttaggttcaagaccacaaaatggggattcatctctgaataaaaatacaattagctttcctttatcgaagtagggtcagaaggcctagaatgtgctaatttggcccccttcaagccaaccttattgattcccaaacttgttaggatttctaacatctcctgagaagttttgttaattatagattcctggctcttacaggagaacagaattagaatctgtaccaatatgtccaagaaatctgtatttttaaaaagtacctcaaataatgctgatgatggattcagtttgagagatattgggctagatgataaaatatgccacaagactgttcagcctgaaggtgagttctctctaggagctctgcctttgatattctgatgcacacaatctttagtagtgactaagatgaagatatagaaaagataagatatggatgatatagaaggtagaagatatggaagatgtgtttatcaaggaggtattagagaacatgctttgcagtcagatagacttgggtccctgcccggcttttgcactcactaactgggtgacctttatttctaatatcactatctagttctgttgatgttagacttcaacaaggttgggaatcaacaaggttgggaatcagcaaggttggcttgagggaggccaaaccagtgaactctaggccctctgctcctacttcaataaggaaagcctaattttatttttattcagaggtgaatccccattttatgggcctgaagtgattgcaatttagaaaggagtctcttattaggttgttaaaaatttgtaaaaggataccacataaakaattaaatacccataggtttaacatgtaactcagcataaagtaaatgtgcttttaccattattaccatcattattaacaataaaatagtagaagaattagtgggaaaaaaatcacaattcaaagtggattgaattcaaagtgaattcgaattagaataaagggctaaaaccaagggagataaatgtcaattcaattcaacaatcatttattaaatcttatttcatgcaaagtatttaaagagctaatgatttaataatggaaagtgatgcatgaatcaaaaattatacaaaatttgataagagcaatgatagataatacaaagcaagttaggaagtatagagacatctaagtcaagttggttattgagaatgtcatgtaagaggaatttttgagttgaatattggaaaaatgaaatcaattaactagataaaaaagggaaaaagatttttaggcagaaggaataatgtaaaggatcagagacctgaaatagtgggcataatgctgcagacattttgctatcatcaaaggcaagctgggagcacttcaataagagtgaggtgagctgttaagaaaaaataggggtctggagtcctccagaccttcaaaggcttagctgcaaattattctggaatctcagtagtaagaagacgataacgaagttccagctgggggtaaggataaccttaatataaggctttccttggttgtatattggtcatggatgtcagatccaaggtgacatccatttcttagagtccaataagttgggattagtgtgacctgaccacagtactctggaccataataatgctcattgtaaagcacagcaaagaaaatctgttttgtagggtctatgtgggttacacaggaatctactccaaaacttctactcctcaccscagggaggagttgcagacttttctaaaccatgcatataaagcagcagaggaaattactgaatgtgcagatttccagtttacagtctcagagatttttggttcattggggccaatacagaatatagaaataagcattttaraagtcgtcccagatcattctgacctaggcagtcctcaggccagtatttggaagcacagctctaagcacactggacccttcagtaaatgacacatactgagtcggttccacttggtggaagtgggttttctaagagagttccagctttgagtctcagtaactctggcttagttaacaagataaagggccttaattatttcagttagatgtaattaaaataaaatttggagccccatgctatcctttcatatacgaaagcatgctcaaaatgtcaaaataattaagtcattccaatcttcactcatgcttcatttagaatatttgaagggacctaatttcatatcctaccataggactttaaaaatcccccttttcaaatatcttataccctaactctgttttagagcctaaacatttasaggatctctaagtgatcctttttttcattatgcctctaaggccctctagaattcttttttagttttctgattccatatcccggygggtgtcgcatagaccagcatagaccaagtctgtggattgaagtaagggaaagatttatgctaacagtggcagagctgtctttgaatgatgatgaggtcatggaagttgctggggtcaggaagagcctttaaatactattcctcaatttttactctgtttgatcattttttgtacttctataacagataatattaattactattactattaatattaattaatagtaatagtaattagtattaattacactactcaaaaacccatgctgttacagtttattcctcttttccttttcttggttattttacttcctattcagtgcctcagaaagtgctgtaaagtttagccttgttgcatctgtcaaggtccctcatcaaaaacactggaaccaggaaatatgaaattttccaagggacaatcattagatatgcctcaggttcttttgtcttcaaggatcgcgtttctggcaaaatgcaaagtttgagccagtctctgggatcattcagtttgagagtcatttaccactatctatgccctattacttcaagtgaagcaactgtttgtgctcttgctaattgatatgtctggatggtttagggccacctgtctgtctctgggtgagatctgcatatcactaggagatatatggccaaccacttgtagggaactttagatactgaatacatcaatttggaggatcccgttttttttttttttttttttaaagactataaatgccaaatacaacattatataggaaaataaatattaattttaaatgagaaaaaagaacttatgaaattataaaattttaaaagttaacgcatattacaaatatctcaaaattcagaaaaataaaattttagttttaaaaatttaagtgagcatctgaggttatttcataatacgctttttctcttattttgtgactatacattctttgttcgtctctttctaaggtcaacactatgatgttttctatggagagtgtagacagataattcagtcttttctctagcactgtcaataaaactttatttataggttagaaaaatctttcagtttaataattcattattagtaatgtgttaagatgtaatctaatactttgatatatgtaaatttgtacgcagatatagtttttattttagaagaactactacagttttgcacacttcacacggaggaattttgatatattctatttttgtaattttatgcaattaaaaatagaaacatgcacagtataattgttatatggaacatatttttgatagatgaaaatttccatttgatttcacatggatgaaaacagattcatttccttacaacagtatgtatataatgtttggaagaattttgcacaaactagcctctggttgtatacattttgaattttgtttctccttaactatttacatacttttggtgccagttaatgtaggacattaacatggtgaatatgcactcttgctctactctacagtkagttgtaatatgaggtaaaattgtgtactatatcttatatgatatactgggttttatatattttcagtgtatgagaatatttacaccaacattctgaaagagtgcagcaattgtgagctctcccaattgkcagagtctggcctggatttgtacataaaaaaatataatatagcaacctaaggaattaaatggtattccaatcgccatgtgytacttgaagaccattgcaggagaaccgctgtatacatcacagcaatactttgtataactccccttttttcttctcatctcacaccgtttcactgctatagagcagtcaaagcaatttgccagtaaagcttacctttcaaatcccaggctgtccttcccgaatatcatgactgtttagattatttagattttctggctatgccttccttgtttacctaggacttctcagctagcttcttacctagtacactattacaaagcataaaatctctcttgttagagggcaaggtagggaaacaatttgagccctttatcagataggtggagtggagacagagacaatggctgagactcacttactggtgatgcttgactcagtcatatcaacttgaccaggtcagggaaaagggtacaaaatatagagtcctatatttaggttacaagatctagttctaagagaggtggtcaagttatataattttgtagatatcattgtaaagataccactgtaaaaatatctttgtatttttttctcacatgaattttagatcctcctctgaactcttctgtcacttaacaacagtgctaacttaaacttttaatatttccaccccatcacacagttaaattttctcatcttcagcagagctacaaaaacacactgaataatttctatggtaatacagaaccacccaaaacattctcctcttctgtagtttgcaaacttatagtggactaatctctcattaagttaaaatagtaaacatagaaatgacatgtatcataaatgggtatgagagaattacatataaaaagtgtattacaaatgcagctctggaatttagagacctgtacatggagtagctttgtaattgcatttgttcagggccggtgcagcggggagttaatcactgattaaaatctaaatgaataggagtcaactcttgtcaaaaattgaataggaactctcagttccttatgtacttccatttaaagtaaatatttatttcactttattgaacatcccacattgcatgttatcagttggaactgagtaaactttactcagtgaaagttctattttctctaactgtcattttgaagagaagtaaagggtgataggtatttttacctttaattttgtgggacttgaaaatgaaagaattgtatactttgaaaaatgttaaaaattaattcctataaaaaatttcaccctataactttttggagtattttaataaacagtatcctttaagtttagggttattaaatgtttttcttttacaatacactaaaaagtaataatttatcatacaaatatatgagtatatataaataatatatcaataatataccaatctcagcctttataatattgaagagcatcaggcctttccctggattaggctttggcttaggggaatgttgtggctggtttgatcttctgcctagaccactcaaactttctccgtttcagcaataaggctgtttcacttattatctgtgtgtaaaccagagtagcacttttaattcccttctgactttttctttgcatttaaaacttttctaactgtttggcataagaggcytggtttatcacctatcggggctttcaacrttcctttctcactaaacttaatcattttagcttttgatttaaagtgagagatatgtgagtcttcctttcacttgaacattacaggccattttaaggttgttaataggcttaatttcaatattgttgtgtctcagggaatggggaggcctaaggagacggagagaggtggggaatgcccaattgatagatcagttgaacacacacaacmtttacttattaaatttgccatcttatatggtgtggttcatggtgccacaaaataatgacaatagtaaaatcaaagatcagtgatcacagatcaccataacagatataataataatgaaaaagttttaartattgtgagaattaccaaaatgtgacacagagatacaaagtgagcacattctgttggaaaaatgatgccaatagatcttgatcaactcagagctcccacaagccttcaatttgtaaaaaacacagtacctgtgaaatacaataaagcacagctgaataaagctaagtctgctgtagcctatttacaaaaaaacagttgaaacttccaatatgattctctttcagaagtttttgagaaactctttcattgtttatcactgcattctcatatgcattatcttgaaattccactaatctcagggaatttgggtgagctgatgacactaacaacacttaaactgtattttagccattgccattgtctggggaacatattgaaagcctaaatatttggaacacattatagtattcaggtaattacaacatgataggatatctaaatgtgtatagtgtgaactatcccagtttaattacgtcatgataagagttagtagcaaataaaatctctaagcttgttaggctataatcttcatgatgctttgcatatcttgaaaactcttgcagaatgttacgcaaatattgtgatgatttggatctatatcaaaatgtgcatgcttaaaacaattcttaaccatggtaggcctattttttttttttggctagagatatacagatattgccatttccagactgtgtgctggtgatggcaaaacttgttactaaccaaatcatgaggatttttatcattttaaatttaaaaaatcactgcaacgtctgaaaaaagtttgttaaataaaaccagatgtagaaaggctttcttaaaatgtcaaaacagtaatgtaaatgaattgttagtttcattgtttaaattataaactttagacattaaaacaatattaagattgaagtataacataaactccccaagagaaaaaaaaattaaagcaaggactttgtaccttgaattggaacctgcccttttttattcattggaataaaatgatactctatcaggatttcctaaaactctttacttacttgcctttactgactaaattaagacagaatactattatttcttgaatggcctcattatattgtgagcacttttaaaaatgtaaaagtagtgatttttttggattctactttctgtatttatcataattttattaagataccttcagtgattatcaatttttagttttcatgatctgggaacttcattatcatccctgttcattttccttttttttcttttatttatttatttatttatttatttatttattattatactttaagatctggggtacatgtgcagaatatgcagtttgttacacaggtatacatgtgccatgatggtttgctgcacccatcaacccgtcatctacattagctatttctcctaatgctatccctccccccgccccccaccccctgacaggccctgatgtgtgatgttcccctccctgtgtccatgtgttctcattgttcagctcccacttatgagtgagagcatgtggtgtttggttttcttgatctattgattgaaacatctatttaaaaaaattattgtttgcttcattatataagcttgttcccactgtctcaagatttttgttaaattatgtgcagaatgaattaaatataggccaagattatctatatttattgtagattaaaatttgtttatttgcccattattccgttttatgatatactgccaatctctatccaaatctgtatttggttaggaacatgatctttattaacttttgttatcatgagaatacatatgtctctaataaatacttatacatactatgtttacttaggcttaagcattaataatattgattaacattattctttagtgttgttttacattttattacaatatcctaaaactttgcttttctttctgcttattatcggaaataagtttgcttattttctttttgtaatttgtgtgtgcatgcacatttgtgtgtgcatgttagaaaaacagagacagagacagagagtactcacactctaaatagcatcaagcacaaaagctaaattcatggatatgcaatcaaaaactgtgtaaatatgtacaaactatttacaaaggaaggctataaaatggtgagaattacaattttgagtaaagtgctcctctgtgttattagccactgtgtcctcttcatttttctttagttctattcccagtaccattttttttctaccacagaacttgtcacaagatggattctcacaattacctgagagttggcctctcctatctagactatcctttgcacctcccctaaattaattgttctataatactacatttagtccagtcttctcctttctcaacacccattctccatggctttctattgccttcagcataaatcagaatctttatactaacgtgaacctaactcaaagacacatcacagtgtgtgatttcctcttcatttataagcttatccccaattgttcactactaatcttctctagccaaataatatgttaccacttaygcaaccgtccgtctttcttttccaaccctattggtttttcagtgttgcagcttttatagctgtaaaatgaattacctgagaacttagtggcrtaagtaaacatttactatgctcactaattctgtgggccaggatttgaacaggacatgggggacaggttgtgtctggtcttcagtgtctagggcctcarctggatgactcaaatgctggaggcaaaagtcatctggaggctacttcaatcacaaatttagggggtgacactgactattggctgggrgcctcagttcctcttcacatgggttctccaagagggtctccttatgtggcctctttgcgtaggctaatttggrctttcttacaggatgttggctgatttccccacagtggctttccccaaaagagaaagccatatggaagctgtatccttttttgtaacctggcttcagaagtcatatagtatgatttccactacattctaatagttggaggaatcacagtctacccagcttcaaggaaaagagtaaataaagtttacctctttgtgaaaagtggtgagatcctggaagaacatacaggaccagaaatattggtgtggccattttttgttggaacaatgccacagtgaaggactgcagcttgtatcccatgtgctctgtcaaactctcccagacttttataggccataccaacctttattcattctgaactcttataatctgtgatctcatttacaaccagtatatttctttgaattgttaacattccatgtgtatctgttttgtctccccaactatactactaactacttcagcacaataacctcattttcccccaggaaagtaaggtctgtatttttattttccacaggacctagcatagagctttggacatagtaggggctcaataaacagctagattaaagtcagatagatttagaatgaaatgagagatatcacttttatgcattgtaaatgaatgtggtagatactgtttggagaagacgggaattggtgaggcaggggatagtggatacaatagtatagaattaagtgagaaaagatcacctggtaaacacaaataaatgtgtttatgaatgaaacatgaaagcttaaatgtaataagtcatgatggcagtcaaaggaaggtacttctttgcatcttaggtatttaatttcaaatttatatgtatttaaaaactcatataagtaatgcagattatactaattgaaagcattaaatttaactctgctggcatttgagagttgacaagatgaatgtatcaataagagtaaatattgtaacatgtatttttatatttaatattataatatttttcaaatgtatttaactatgttttaaaaagcattttttgtttggatttatttgcttttaattttttaaattcaaaaataatgcattctgatgatagcaaaccaagttatataaagaaaacccaatagccctttttctgcatttctatattgaggattccagttttggtttggcatrttttcacagctttttgcatgttcattttgtatactttccactgcttatatactattcttcatatttattgttcatgccacaatttattatttttaaatatgtaaggctcatggttatgtcaatggtaatttctctgtgtgatgattatgggatctgattaatagttattgttttaagaagctaattcttagactttgtggcaaactggtaaatttgatattttaattcaaagttgagttttttagagatacagaaaacaaagtgttgacagggtaggttaaatttttcaggtgaaaactctactgtattaatttgttcacatatgaaaacgtggtaatactatgatagtgttacataaagctttataactattactaactaaagcaccaatgctcaccaaatagcattctgggatctcagccttgttaaactgttctaaagaatatgtgtaatttacattttcctaaacattgtaaaatttcatacactgaaaattatttggacataaaattttcatgtgtatggtaaatgaatagcatattgcctttccaactttccccagtctcaggagtatttcagccttggaccatgaaatgaaaggaagggaataaagattggttaagtgaaaataataaagttccgaattcctatctgtaataactcattttacaagatcccattctgtaaaacagttaarcttatctctacttattatamgtctatgagactgagaactactttcctttacattcactggcatttttttttatttcagatattaatttaaagactctaactgtccatgtaactataacctacctgaaactaaaatgattctcggtaacatattcgaagttacacatttacatataactattatgtatttaagatggctgatcacactgaagtaatgaaaggcatkcatcaatatccaggagttcgctatcctgtccttactcctaatcttcagggttttcaccatgctgtaagtgtgctactaatatctctaaaattgataggcctcttatygttttaaagatatttacaaagttaaaattgtgtcatatgtaactcatctgtaatacaaatactatgctaatgtactaacatgaagacatagagctccaagtcctcacagcattgttggggactaaagtggtctatatacctggctcttccagcttcaccgttcaaaaatcaaaacacaaaagtaaaattctgcatttttttgtgaaatttcttagaagtatattttgtgcttcttcttaaataagtaatatagaatactatttaagcatttttcaatgcaatttttatagttattaatattgttgaatttggtaattatttttgtcaacctttgttgatcagctttttgtgtctgttattttctccctctgggtgaaaagctaattgtcattttatctggctctagttactttccctatttatcttctgatttgtttcttttgatcctctgtgatttagaaatttatataatttaaataaagctttaataattatacatatgagactatcctcttcaattttaaggtgttatccgtatatgggcttattgcataggttttgcagcagctatttctggtattaatgaatattaatgaaaaatattcattatatgaaactatattatgtaaagttgagattgtggggtattaatcgtataatgtattttgttagaaccatttatttttctcttgggtttgatttgataaaatttttattgcgttgtttaaaaagtcatttaaaaattataaatattggtgtcatctagtaatcctaacaaagtaaagaatgtatcttaccttgaagaagatactgaaaggacactctcatgttaactcagaggggcaagcactggagtggaactaatcttgactttggagcaattctgtgctcaaaacatgactccagaacttttactccctgtgtgatatcatgctaaggatttaccttttttgygctatagctgtttcatctgtaaaattggcataacaacacttagtttacacagttgtttgtagatgacaaaaagcacatccatagtactaaaaacagtacagacaaatagtagatgttcactaacagagtttttattttagaaattgaaaatttattttggatagaggcataaaagccaatattttttaaatgtttgaggaaagatgaaaagatagcttttaagtttttctccccccatgtattttttttttttttctgagatggagctttgctctgtcgccaggctggagtgcagtggcgtgatcttgattcactgcaacctccgcctcccaggttcaagcgattctcctgcctcagcctcccaagtagctgggactacagatgtacaccaccacacccagctaatttttgcatttttagtagagacggggtttcaccatgttggccaggatggtcttgatctcttgaccttgtgatctgcctaccttgagttcccaaagtgctgggattacaggcgtgagccaccgcacctgacctcccccccatgtgttaatgggggattagcaagaggggagaacgtaggcaaagtgctagaaatacattaacagaaggtcttaaacatccagctgaatgactgagaggcttgatatttgaaaacaagtcactggagagcctggaagaaggaataaagttgacaaaaagtgcaaaaaggaaattgattagattaatattttgcatttaaagactgacaaaaagatcaaagcattaggtacacacgagtatggctgtagaagtcaggatacaaaaaaataaaagctaggttaggagaccaaagaaaaactgggggcaaaatctaaatgatgawttggaaaaatatttttctgttggattgtaggaagagaagataaacaaagtagttrgtatcttccattttaataattggtttggaaatattttttcatggaggataagggttttattggggtgctagtattttccataattaggcttacagtatttctgaagataatacataatttttaaaaggcataattaaatagaacatcctcattgtgtttttgtgcctcacagacttatgaatattgcagtttgtggattattctgttattacaaaatatttttacatttcgaaagaatatatgtggcaagatgagaggaatccaattttaaattctaaggcaaatattaaagaatacatgtatgccttcatagagtagttaatctttattctaccactgtcattcacatttttgaagttattagatttggctttaaattatatatttttcaggttgctgctggagctactgagatatcagtttttggagctgcatctgaatcctttagcaagaagaatattaactgttccattgaagaaagtatgggaaaatttgaggaggttgttaagtctgcaagacacatgaatattccagcacgagggtacttatgaaatcccacaaattctgttttgttaatgtttattgttaaagcttactcaaaaattatctagagattcttatatcatttataaaaatatrcatagaatatcatatttctattttgtttaatcagggtaatcactatatagttacatctcattaayatcactgctgattattagtgagtatctagcttgtggaatgtgtcatgcarttgaaatcagaggaactagcatgcaaatctggcattattaactattttattaacactctagcacccaaatgcagccctcttatctcagcctacatgtgctgataagttggtataaactcacaacagcttttggaaaagaatcacctaatgtggttttcaaattttttttaaaacatgactttttcttcaaagagtattttatgtagaacttcaatagaatacagcagatataaaattgagctgctctgggaaatcattttatccattctttctccccctcaatggctgacttttctacttcctctgggtgatcccaaakcacctccatagtatcttgcagaacactgtttaaaaatacttgataaattgcttatagaagataaatataaactttcagttctctactattttctattatatgtgatttctataaatttaggagtatcagagatatcaatccctttctcctcgccttgcctttttcttgtggaaacttatcagctgttcattctaagagatgttgattacaggacatggaaaataaaaactgacccaagatccacaaacctaattttctctctcaggagtttagaaatggtataccaaacatggttacttgtattgaaagattatgtgattttgtcactgagttcactattttggggttcctaggatggagccacatgcaaaccagtgacaggacagagtagtagaaagcagaaatggaaaaaggaggctcctagcggtgatgagaggtatgggggagggaggagagggaaaaatctgccttggtgcttgtctgcttccaggaccaatagttgcctcaagtattataaccaggcctatgkgytgtgaaacctataatgcatttttgtgtgtgtttgtttcttaaggaagaatttgtttctaagacattagctactttttctattaattttataaatatggagatatgatgaacacacatcktaacaagttaaagtgcatagcgattggtaatagaaggttgaaagctggggatggatttgggtgcaggctgtacttcccttagttgaggtgagcaaagttcatggtagcgggaaagattcaacagttaatgagaaagataagtgagtcaattgtgactgaaaatattagtgaaatgattggaatttcaatcaaggtgttttgggggaacaattagagttagactatacctagtaaaatattttgttagtttgttttctatttrtatttttcctgtcctccatagtaagtctacatgagtttctaaaatttgaaattacttttgtaattaagatagatgcatatcatgtaaggactatatgagaaaaatttaaaatccaaggcaatgtacttccaaagacataaaataaaggatatttatttttcaggcaaaagttacaaaaccacaatcaaaaaggagagatatactattggtttctcaattcgaatataaataagttgtctcaattttctttaaaataaagagaaagatgaagaccctattctacttcaatatgtgtttaaagtgtggagtataagctttaaagtaattctcattgggaagttaaaaagtatgtgactataagaagtaaattgcttatgtagcttgctcttcaaataggaagggtttttttagtgttgaaagatggatgcaaatataagttgtaggaagtaaccttttattatcttagctttctgttgtaaaatggaatagttaatgtaactgggctaataaaaatcttaaaccctcttaatactcattgtttgacaaataatattgcctcatcagaaaaatgaaaacttctaatcgtgctgtggcttaagttttccaggctttgatgaacaagaagtgacccacagtaaagcaaaatgagtagagtatagtggagactttactgtagaattatagacaaatgtatgttttccagtgtggattttgttcctttggagtacaactcctgaattttctgaaacactctcattttcagaaatatgcctttcagtattagagttcagcagctatttgtgtagttgaaaataccttattcctcccaacaatttatataaagtttaaataagattttatttttactggcaatctgattttaggtattcaccattgtaagtcataagccattagtacctatttaaggaaaggagccatgctcaactagttgaaactgcagtagatgcttcagcatgtcttgcatggtaacagctgcatcaacatayacttgataatcatccagaaaatttatgtcgtcagttgtcagctttaaaggccataaagcagtacacgttttataaaagcacactaaaactattaaaatttttataaaatagtaaacattcatatagtccaaatagtagcttttattacagttatgaaggctattgttaaattccccccacacactcactgaaacacacacacaacacatgcatgtgtacacatttttaatacacgctcagaactgtacataacgtctgggacacattgtgaaaagacaccatgccaaatcagtgacaaaatgcagagtcagcaaactactggttatatgcgaatgcaaaatgaaatatccgcagtttggattttattttttaatgtgcagttcatgtgactttttttaaatctagataatttttctattaactgtctaaattgtaaaaggttaagagggcaaagaaaaataaaagccaatgacaaatgtgattattttccttttatcaatggtatttattgaaagaaatatctattggcttgccaggatccttttaaaattgaaattcttcaagatatgaagtagtactttaatatataagacattcagaatttattatttttgtctaaagtgattatcagcttctctttattgaaatgacattaatcacatgctcactctttgtgagagtattaatttaaaaaggaaattcttagtaagttgccattattaatttcatggttaaaatgattataaatagaaattataaaattacaaggtcagcaggtttgtatatatatatatatttattattattattatactttaagttttagggtatatgtgcacaatgtgcaggttagttacatatgtatacatgtgccatgctggtgtgctgcacccattaactcatcatttagcattaggtatatctcttaatgctatccctcccccctccccccaccccaccacagtccccagagtgtgatgttccccttcctgtgtccatgtgttctcattgttcaattcccatctatgagtgagaacatgcggtgtttggttttttgtccttgcgatagtttaccgagaatgatgatttccaatttcatccatgtccctacaaaggacatgaactcatcattttttatggctgcatagtattccatggtgtatatgtgccacattttcttaattcagtctatcattgttggtcatttgggttggttccaagtctttgctattgtgaatagtgccgcaataaacatacgtgtgcatgtgtctttatagcagcatgatttatagtcctttgggtatatacccagttaaagcataaatcatgaaagtttctttacataattacatcttatacttctcctataagatggccaagaatcatttgattcgtgattaaccttctgaaagtttatactgaaagttcaaagaagagtatatttaacatttttcctaggagccacacaaaattattgattcattgttttaaaaattataaaactttaaaatatttatctgtgaattgtaactggttgaatttttttcaactaatagagacaaacatagattacttttagatacagaaaaacaaagacaattgtcaggtgtgataatgtcatactttagtcataattttttaaataaaatgtgcttagtatttaggaggaagtaaggagtcagattttccgagaactgtaatgaatctagggtgttcattttgtccatctcttcgtctactatttttctcactattgactttcttcttatgcaaaaaaagggaaaacttaatttkgtcttaaatgcttccaaaagggattgcattacatacaatcgtgaagaattcctttgatgaaagatcctcaatgttaggaaattcttcctgtgtttaattattttttttaactgattcagctctatataattctcatcctttgaaatggcaatcttcccacgtgccatgaagtcagggcacagtattctcctttaaaacactgttgtttccccctttgagagataatttataactacacacatttattcaaaaacttgcaacctacttgctgaattagccaaaccacctaggtcacgttgcattgagtgtgtctttcctgttctccttgtctaatgtagaatctcagtatggactcagatcctgaccctgaagataatagcagtcttgttgagtgagataatgagtctccttatttagggctccawttttaagtacactgtgactagtagctagcatttcttatgacagcatcaaatcccttccattggatgatctacctctatggaacacttgcatttatagcatcatattcttgtaagtgggcagcaagaagctgcccacagaagttcctttccaaattctattgttcaactgaggcctaggtctggaagaacaattcaatcatcattatgtaccaccaaaatatgggacataaaactctaaaaataagacatctgtgaaagctattttctttcatacatatggtttgtttaagggtttgtactttttaagctttatatattattctggcactgctgtgtgccagaacaacacatacccagcagcagttaatatttgtaagctgggtttgtgcagttgtgtctaaatagccttcatttagacattttgaggtaagaatatgtttaatcatttctcatgaaattagcattaatactttttcattattaaatattcttttgctggattataccttgccatacctgggcaagaagtagaattttaatttacacaagtaatttcaagaaagttaatggtgtccctaaggtgtgaaattaattcagcacggattgtggttgaatggtatatgtttatagtccatacagtcacttacaataatttaaaattatttttaacatgctttttcttttattatatatgtcaatgtgaaacaaggatataacaaagtgaatttaataagtatgaaaagagagttgtgcaacatatkaaatagaaaaatgaacatttagaagtttttatcatgagattaactttaytatgaattcctkaaaagtgtttacaaatttacttttatttagaaacactattcatatgaaattagaacrcagaatacctggaagaagtactctgaataaagtttggaaataataagtattcgataaatttatttytaatcttatttaactttttcaatataattcagcagaaaacataatcttaggcattcttcaattaattcaaaattgaatcaaaaatttattttaaaaatgtaattagggattgaaatgagtcaatctcagagctttaccttggaaatatctaaccagattctctgaaagcattactcaacatgtttagtagggttacattaaaattaaaacagtagtagtggaggtagaggtaaggggagaattcatggttcaaaaatttgtggacacctggactaaacatggttatccttgttaaccaggccctccaaatataggacttctttaaactagggctggaagatggctgttgtgttggactgagtttctcacatttactgatctttggaatccctttttcacctgtcatttcatgtggccagtgctctgaaattctcacttcttcactcatcaatcaactggacagaaaccctagaagctaaatattttgagtgggtaggccaaaaaaaaaggtggcaattaaagttttagcactatatgaaaaaggcaagattagtttggtttctagtagttgaatttaacattgatgctttttttaattgttttcaaaagcagacatgctgttgaagtttayaaaataaaatayaatgtgggagctatgaaatgaaatgtctttcatattgaacataagagaacaaattgcacagtgatgtaagtttcaggtctcagagatttaagtggatcattaaaaatttgagagcttggctggagacagagtcaaaagccaggacatacagaactctgagaaaagtctctgraactacattggtttaatttgttgaataaaataatattttgtacataatcatgctatttaaaaagacagactattttacaaatctcttctaaaaaacaaacaatataagtcatcataaaatggaacatgaagtattacctgaagtgtccggcccagatcattgggaacatattcagatattgagttgggtttagtttgagggctggggaaacagggagtctgccatgcaggtcccatttagaattgtcccaaaggatacttagagtagtcccccttgtctgcaggagatgtattccaagaccccagtggatgcctgaaactgtcgatagtattataccaaaccctatgtatactctttttatcctttacatacatatgtataataaagtttaatccacacatatagcctcttcagtaatttttgtatgtttgagtccaaacctattcctgaatctgtgaaatgtcctttacctgcagtaacggcttggggtcaccagtttcaggagatcccttgctgaagtcttacaggttcaatgctttctggtacaacacatggtcctcagtcagaacatgttttctgttcatgtcttccacacacaaatttaatgtctttcccatcttaactaagagcttatcacatgctgtggctgtgatttttgtagtttgaggtacgacagcaaagccagcatgaatttattttttccttcacaattctattgataggagttttatattcttaccatagatgttagcaacgtcatcatacaatattttttttctttttaagttgaaaactttccccattttacttaaaggaagcactttgcagattctttttggcgtatccaagttgccaacctcactatttttgggctttgggtccatcattaagtaaaataagtgttacttaaacacaagcactgagatacagttgatctcataactgagagaaccattaagtgactaatgggatgggtgcatctacagcatggatatgctggtcaaagggaagagtcacatctcaaacagcatggtatgagatttcatcatgttattcagagtggcccacaattttaagcttatgaattgtttattctggaattttccatttcatattttcagaccatggttgactgcatgtaactaagattgcagaaagtaaaaccttagataagggaaggctactctaccagtatgggactcttaacactttttccacgtggctctgggtggggctgaggccttttaattaaaaaytactccaaggattcatcattttaagaggaaaaaacacaaaggatcaaatgaagtagtttatcaattagagtggaaagacaaatagagcaaaaaggtatagaaagtttcaaaaggtatggcagaaaataagatcaaggtaaagataatttaaaagtcagtctgaaccagtctctatgtctggcttcccgggtctgagcttgtagttagtgtgggaatctgagcttgacacaggaagctttctcattgtaaacagctcaactgatgtagtagaaagacccagccttcaagttggacagacagtttggttttaaagcctagttcagcagtttactctatttgtattctgcaacytatttaatttacttgaggctcaggttttccattggtgaaatggatttattgtggagattacaaaattttaagcaaatgtctagccccacatatgtttaaatattttacgtggcaacttttccaaggatgaattgctgaaggaggttatgccattttctttmaaagaaaaccctaaaatattctaacttgaatacaaatttactttttagtttcatcaggaactacgcagataaattaacctcacaggcatatacagctttaggaacaaaactatatgtaaagtaagatattacatgaaattttttttctaaactttgcatatatttrtagagagatcayagtttatacagaaggtatttttaatacacggtattctaatagtaggcttaggagaaataaaatcagtcaagtattctagagcaaaaattgaatcttagcagaattactcctggatgccatgaaacagtctttaatttttatgttatccacaataataaatgcattwcaggctctcaaaatatattgttcattcacttaataataatggcatgttattttgtgttgcttacagaawggtgtattccacatgaatgtagcaaagtagctcctatgtttatagatcttaattccctttatttgagattacatataatttcatcactcctggcattgttctcttctgaggataagcaatagttgactccactccaaatgtttgtgacatttatacatgacttttacttatactttttgtttcaatttttgccaggatgattggaggaacatgggataattgtgagaaggtaggctgggataaggcctaactgtagattctttttcatgatttaattcttctaggtaaggttattaaagactgaaacacttcacgtcttgttttatatcatgtttttacagactattaaaaaatgacctcaacaagcacaaatacaaataaaacaattcatattcatttccacaggatttactgtaatgctgtgttttttgttaattttagcaagattcgtttcaatatggttgatgattactatgtcatctgaataatgtttaaaaatggatttcaagttctgatctctcaaatatgtgctattacttctggctacaggatttagaacataaataaaccttacctatttgtttactataaaaattaggaatgtcttagacaagtattcagaaggtaaaaatgacattttaactaacgtatttgtgtattaattcatacaagaaatagcaattgaatacagtaggccctcaatatccatgggttatacatgcagggattcaaccaactatgaatcaaaaatttttaaaaataatttgaagaaaaataaaaatacagtctagcaactacttacatagtatttacattatattaggtattataagtaatctagagatgatttaaagtatatagggagaattccccacaaacactgagggatgactatatttgttttaaacaaagtgctgtcttgtgataccatgtgggctatgaaaatgaaaattcagcataacttcaaagagtttttagcagactgggaaaataaaatatgtatgaaaataattattgtactgccaaaaccggcaagtacattaagagagataaagatacatactattgaaatttaaagtaattctaatatctggggtgatttagagaaacttcataaagaaggtaccagtacaatgaagtcattaaaaatatatgaatgtatggaaacataatcaaaataatggctttttcaggcagggcagggaatctacaaagagcaaagacacagtgaagagaaatctcaggaaatgtttgggtaatagaaagaagcttacttttattgaaataaagttttttgtggatrtatagtaaaagaaaggtagaaggttagattggagtttcacagattgctaaacttgaacaccagtttattcagtagaaaatagcaagccattaaagattgtcaaagtggaaaaatatgtaatcaaatccatgctctaagaatataattttgacattagaaattgaagtaaagtggagagacatggggttagaaacaaggagagcacttaggagagggttcttgggaatggttctgtacactcaagctgctgctggcagaggctaaatgccacagaagctagaggggaagaatcagctaacctttggttattgaataagtttacaaaggtgaccatcaagtgacttagcaggactgaccctgagaataactatgtaatttttttaaatggcaaatgcaggggaaacaggtttatgtgaaagaaatagggatgatgaccacttcagacatgtttaactaaatatgctatgtgaatgcatcaagcttgtaatgtacatgaggcactttggggttgatcctggggttatgggcataatggtgagcgagagggactatggaggacttagctaacccatagaccccctttttcattctcattacacacacagaaattttataacttttagaacatatcacctagctgagaaaaaaaagtctcaggtttcatcaatgaaaatgtggcaatcatgtaggttgataccacagaagcatatgggggtatctatcccagaaagagtacctagtagtgtagtaatgggattttaatatctacatgggaaaaaattcaatgttctgctaagttatgaatttggaactatgtcttggagtctggtatcacctctttgccaatgcaaagtcattgagatccatgccagctatttttatgggttgtggatttgtgacacatgagtattgtggaaacccaaattaagaaattaaggtagaaatttgttcaataattgataaattccacagggtaagggcagaaagcaatcagattctttcgataggattgtttaaataattcaagatgctcatagaattcctacagaaactaaaattgccatgaaaagacactcacaataaaaactataaagcacatgagaaaacaagctaacttaaggaaaacaaacacaggagacaacgaaaaaaactttagcagaacagaaggtaacagaacaatctgaaaaagattataagttaaccacatgaaatgtttatagaggcaaagtaagaacataagacttaaagtataataataataaaaaagatataacatctttgtggatgagaagaataaaattcagaagatggataaacttgaaacaatttagcagtctaacaaagtataataaatagcaaaatcatgtatttgaaatgaatctttaaaaaattcacaatgcaagcaaaaaaaaaaaaaccagatctttacagaaaacaaaattagtatttgacaaaatgaaacattatctctaaatgggaatatattcattaaaatacaaaagtgaatgaattaattgaacagcagattacatgtcgccaaagggaacaacagattatgtgcagcttagcctgcaattaagatttgagaaaactgtaagagtgaaacccagaaaaataaattaatagaaattgtaaaagtaaggttagtagaaaatgcctaatagaatttccatatggagtaaacagagaaaatagatatgagaaatatgtttgaaaaggtagtaccttgagaattttctagaaattaggaaaagcactgttaatattgaagaagtatagcagatcctgagatagctaatagtaaaatgcagataagatagaaacagatagaacagtagagaaaaaaatagactaccatgaaagaattagcttgacagtaaaattcctgtcagcaataactgagaccagagacagtaaaataatatattcaatatgccaagataactgtcaacatagaattttatacctagtcaaactattgctcaagaatgaagatgaaatgaaaccatttgctgacaaaacagtctgcaacatctaccagactcttgctgaaagaactactrtgtattcacttaagtcaaaaacattgaaccagaaataaggaataagatgaaaaaaataaatggagcaattggagtttgcagcttcagaaaagtagaaatcatttggaacgggtctgggtaaaacttaaccaccaggcaatcaaagctgaatgaaaatattatggcatagttgtgaggaaattcctgagattagttagatacrgtcaggtccatgtaatataactttttacacaagggaatcagtagagcaatccaggtgatgcagtattgctaatagttgagtgattttcaatgttggcagtataatagaactttaaaaattatataaaataatatcttggtggttggatttcatccactaggtttctggtttaattgttttggaacatatcctaagcatcagtgtttatcttttttaaagcaccaaggtgattctgtgcagccaaggttgagaaccactgtaatagattgttrgagaagagcagaagtccagaagctggctttggccgcttgtcaaagaagagaattcagttcatattcatgacggtagaggccttttctcactcaggaaaagcagcttgacttctttagaaagggttgacaacctttttctgtaaagttccagacaataacattttaggtgttgtgggtcagatgatttctgttgcaactgctcaactctgctgtagtgtaaaagcagccataaataagtatgcaaacagatgggcatggctgtattctaatacaattttattattaaaagagtaataggcaggatttggtctctgggccttagtgtaccaacctctgctttagaatgttaaagtatacagttaagggaacatagytgagaaccatcacattagccttggagaaagtagccgcatgcgtgactagatcaaaacagtgttccctcacaagatagggaagagcatatgaacatgaaatgagacagagtgtgaagatctcagaaacacaggcatggaaatgtcctggagggaaagtgtgaataaataaaaatgcccacataaagagttaaggttctgtcaataaagtggtagctgtggccaaataataatttgaaaatgcaggagaggtttgttttgttttgcatttatgtttgtttttcacatttagaaggagaacatgtaaataaataccttggattttctatttactcacatctagatgttttgggttcaaaaatcaatgtatttatatattagcatgttattgtaatcattacatttgtattaaaactttttctccttttccatccttagccaccttctccagtgttatgttcatttaagaacattttattttcacacatcttgattaaatgtacagattatctaaagcataaacttagattatagtgattggaataacggagggatgagcttcctgtctggcataactttccaattttacttgaatttatcctcttttatccttttctatccctcataactgcttgaatggcttataaaactatttaatactaaaacatgttttaattgacattttaacacttctataatttttgtaacctaatttggttacatcttagaatcaatagctatgtactgaatcattgaatatgtattttatttttctactccaaagactgttaggaatttcatagtgcatcttcaaatcaatagcatattagaattaaggaaataggatatttcttgtgtttttgcctctaccttttctctggcatctgcttccactgcccccacagagttatatttctgggaaacaaatctgatcttgccactaccttacgtaataattttcagtgcctcaaaacacttttgagtgatctcaaagtccagacaacttggaatggcgttcaaaggctttgctttctaaaccctttcatattgtgacccccatattcgatctccagcctcatttcccaccatccctctcccttttatgcagcttgcttcattcattcctaaatatcatactcgttatgcattatttcaatacaagaattgtaaatgtctctgaagtaagtttaataaaatgggattgatgttgagctggaaatagctaaagcaggcttttcctaaagcttaattatttaagattgaaatggatgtttgtctttgcaggaaatgcttgactttttaatgttagaatgagttacaaaagaagcttatagaatatctttattctgagccttctaaacacactagacactcttctgtttggaatgatttaggtaaacccatgagagagagagaaaaaatgaactctgaggctatgcccagttccaagacctttggatgattaatggctgtacctaaatgaggccaaaatatccagatgggagtaagaagaaaaattcagttagtttactacatgatctccttgtatgtttccaaagacccagatatttaacagttgagtgtatgtaattattttaataaaaccatatatttcactggtattttatgctttgaatgttatatgttgctatggtatgaataactttaccagataatcacttactatttatccccatctgtcatcaaaaacacatatcaaattgtaattattatagaaagataaaaatgtgagctgattgaaaatgcttcaaacttcatttggtttggtccaatgacaaaataataataaagtaatagtgcaaaataaattttcttgatgcagtttcagctaattcttaatttttataaaatggaaatggcttatttaccatatgcatatttataaggctgtatttttaatttaggtatgtgtcttgtgctctgggctgtccatatgaaggaagtattacaccgcaaaaagtgacagaagtaagctacatcttcagcttttttggtttatggtaacatgatatatattatttttaaaagggggctttcttaatatttattgaatctgcatagcatgaagccatggattaagaggcgaaccctgaagacatatttgatcacttaactaatagtttcattttaacagtgaagtcctgtacattggctataacttttcaacgttaagggacagttgagtcctataatttgggtgctcaaaggtggaaggaataaaaatatacattttgtttttttgaggctataacgtagtgagtggcctttccaatctccatcagaatgtcagggcagtttttggagaaacacttaaactttccttggttgcttaggcagcatccctgttttgctcctgcatactttggcccgttatatcagaatatacactacttttgtgttcttgtccttttgtgatcctggagatcttactgctgtgattaagttgctgttattccagaacaattttacagcaataggttatagtcattaaggccctgattactgaagtttattttcttcctgtcctttattatttatttataccaatgaatacaaaatgcactgtctttgagattatattagtttcagaaatttatttgtatataaagtatattaatgtagacctgtttttaaggttaattttgacaaatttagtaatttttgaaaaattttgcaccaaagcagtgaagacggccttataagaaaatccaaatttaggcaggataaactttcagtttagctaaagctgttcctcttttgtgctttcatttgaacttttggaatctactgcagatttttcaaatgaaacatatccttttatctattatttacacaagacccttgcacacagaggcacatatactataaaataacacaattcagattttttaggtttttcacttgcatgggacccttccaaggctgtcattaatttgcattcacaattgtatatatattttttaagaatacctccaaagggcataacttcaggctggccccacaaaacctggatccacctttgcttaccagcagacttgctttcttccttttgctgtgcaccacgtaggaatgaaccacacacaccttgggtgaggatctccatttctgtacccgaacgcctaaggtgctactgcagagtcatgtaacaggaataattcaggaccagaaactttaaaggggccttttgtgtgattctaatacattttgtgcttaactcactctcttctctctgaaattactacttcaaactgtgattactctgttcaggcctctggtccttcccctcattgtctccctcctcagtttttgctttctcattacactgtcctttgcatttagctttttccctacctggaatgttctttgcattttgtatgtcagctgcctggaagccattaacatttgcatctgatattcttcctagaacattcttctcaggtccttccttctcaccctcttcaacgagttagtaagcactttataataaagcttactttatttcaagttgtcacataggtcctaagcttgacagatccaggtcaatttcctttactacatgctcttrgaatcctgtttctttgtttgaaaattcttatttttagctggtatttatttattcctcagtagggttgactaagatctatcctcacttgacttcaggatctgtaataacatgagccatgtcaatattcatttccccattatatcctgggacctagcacagcacctgccataaaataggtattgaagaaatgcatattaaatgaatgagcgaatcagtatcatgtgccagattgtgtgtcaaatggcttttatacattctcatttcacttttacaaccaaacacatcattattaaaattgtttttatcttttttttttaagaacagagtaaccaaggcttagaaaatatgctaaaagaaggtgttttgttgtctgtattctaaagattagggattgaggcttaaatagactaatcttctgcccagtgtcacatgattaggatgcgtgggagctgagatttaaattcagacctctctgattccagaacccatgtctttgtcaaaataccatgctgcctttatgcattcatattgctctttgaaagtaacattattcagcttgaagagatcttgcaatttacctcaaagtatatatatttatgagccagataaattagaccagaaatattaaatgactctaccatttgcaaagctacttagtgaaagagctgaacttaatatagttgatccatgaacaatttggaggttagggacaccacactccacatgcacagtcaaaaatctaggtataacttttgctcccaaaacttaactactaatagcttactgttgagtgggagccttttagataatgtaacccaccaattaacacatattttgattttcgttatcttgaaatggtgggcaaatgtagctggagacctcaatctatgatgcgtattgagcaattcagctttctctcatgtcatgacttttttctgcttcttgggagcacttccagcatcactagttgcacttcctatgagttcattggtgttatttaaggtttatggtatttcactaaatataatgaaaaacacataagaastgcaagagatcactttgtcctgcgatatgcaatttactggaaagatgaactgttcatacagagatgattagcatcaccaggattttaagtggataccctcactggagctcactggaatagcaacaggaggtggctacaaaattattacaatagttcagtatgtactataattaattttatgcagttatgattcagtactgaatcattacatgcacatttctcttgaatgagaatggcactatctacagtctgtttgtgtgctgagttttgataaattttaaccttttaaaatacatttgtattattttatagtaaatgagaaaaatagattagtattaacacatattttatatagtcatgacatacctttttcttttttgacatttctatgctatgggatttgtctgcaagttttttcaaattgttgaaaatctccgaaaaaaaatttaatatagttattttttaaaaaatcacgtacaagtggatccatagagttcaaacttgtgtagtttaagggtcagctgtatatatatgtagtgaaatatttgtaaatttcacatttttaagggcaatgaagatctcttattactattttgacccctaaactaatagcttgagaaatactacttccaaagtagatctgtaatgctttggtttgattatagtgttgagaaacatacgcctcccataattgacattgtagcttataatttcatagtagaacaaatagctggataaaaagataggtagatatgactctaaggcaaacttgaatattagaaaaagataattgcaataatctcaaagtcttatataatgtttagaatatcataagcaaagaaaaaggaccagaaaatacattatatatttttcatggacattactggtattagttgtaatttttacctttagatgatgttagttgtggcacaagagggtttgagtctcttcatttccattattttactagcacttcacctttatcaacaggtgtctaagagattgtacggcatgggttgttatgagatctctctaggagacacaattggagtgggaactccaggaagtatgaaaagaatgttggaaagtgtgatgaaagaaatcccaccaggtgctcttgctgttcactgtcatgacacatacggacaagccttagcaaatatccttacggcccttcaggtattttgtactctttgtgtgttatgtgtgtgcatagggtgttcatctttatctgtaatataaacatactgaaagctgtattgttacaattttcataaaatgttatgaatctaattttaaccagtgtctgcacatgacaggcacttgggaaatatttgtcaatttcacatttttttagggcaatgaagatctcttattactgttagtttgatttgataaaatctgtaatctattcttttgaaaagtattaatcttagcagagttatgtctgcttgtttctctcctcatattctatcaaccataacattcagtagactgaaatacgatggcattttgagcagtgcaaaacacaaaaatagtagactatcataatcatgaaacaatgctttctttggtgatttcatgctctatgatgggaagatctggtgctgaaatatagtatattttgcttaaaatgttttcttgaggttggcaagcttacttttgacagaacttatgtcttttaatcactatattccattatatgataaagtgaagagatctagaaagttggaagattatgaattgcttattatactctgtgttattttaaatgtattcatttgaaagaatagctgtaagtagcattaaacgagtattattttaaaattaatgtcagtttcttaaatgcagctaaaaatgatttgtttgatattctcagaatccaagattttgacaatcagagataagactatataaaagctttctggttggaggctgaaaaccaatatgtaaacttagtatcacagtcctaaagtatacagttgcttggcagaagttaaaaaacaatgggaagatcaagttccacaagggcttattttgactttgtaacatatgtgtacaaatccttatttatcctctggcagcaagaaaagaacgttctattgaatcacagaaaaaagaaaatgttattccatggtctttggggcatgggaatttttgcaattttccttccctaggtattctagtttctgaaacaatagaaaactaggcagcacttcagtatcctgtgttcagctgcaactggaagttatttttctgaagggctgtttctctctctctcgtttctctgtatgaatatatcttctatattttaacactttgagtaatcatttatttgtgtagcatatttattatagaatgaataacagtttaggtcttcaggataaagggctatagaacaagatctgggacctgcccaaacttctgcttctggactatgtctgcctcttgaaaatgcccaagtaacaaaacattgctaataccccaatgcggttttaatggttaaggaaggcctatctgaagaagtaattgttgcaatcatatctaaagaatgagaaggggccaggcgcggtggctcacgcctgtaatcccagcactttgggaggctgaggtgggcggatcacgacgaggtcaggagatcaagaccatcctggctaacacggagaacccccgtctctactaaaaaaatacaaaaaaattagccaggcgtggtggtgggcgcctgtagtcccagctacttgggaggctgaggcaggagaacggcgtgaacctgggaggcagagcttgcagtgagccgagatcgtaccactgcactgcagcctgggcgacagagcaagactccttctcaaaacaaaaacaaaaacaaaaacaaaaaaaacaaaaacagaaggaactaatcctaaaatggtgtgtatgtgttgtagtgtgtgtgtgcacgtgtgtgaaaagaatgttttaagctgatgaaacatcgtttgagcaaaagtccttggagaaggagaggattatgtcctagtaattaaaagaagactaacgtattcagataaattaaggtttatgaaatttgctaaattggttgaattgcattgtctctattttctgagagattcggactgaaattctgggccatttttccatcttatagcagccatacaggggacaggaaacaacgttgggccgaagcaagataaggaacattaatgagaacatatgtaaggacaggactccccaaaagaccacacccccagtcaaagggtgaatcagcaaaagatccatcccataaagggagagagcaagcatattcatgtctcatggtctcagctatgagtggaggagaaataggatgtatctctttatactacacaacgttttgtgggtttagggttcaagttcacatacctgcagaactggaaagacctaagcagatgagttattttcaaatacttatgggttagtagcactgcaggtgccagaagaatattcttataaaatatacattattaatatatacatatattgtaatgtatttttatatgttaatatataatatataaatatattttttaaggaacatatcttcggcttacgctaaactatttgagatctgtgtgtttctgtgcacgtgtgtgtgtgtgaggggagagatcgatactgtacccctcagtggctcctgtgatactagactgtctgtctaattgtcaggatctgaggatctgtgttttctggttttctaccatgtgcagaagctctgttgtgtgcctgggactctggggcagaagggagggaagggggctaggaaagcaatagtatactctgtgttacattgccccagggcttaatttatagccacagtgtaaatacatggataagagagtaaaagtggtttgcatgataagcaacatgatatgaggccrgagaagctactataaatgagtgactgagaaaatgttcaaaaagcagagatgtagagctttctgtcttttccgccatcagctggcatagagtttgataaacgcattgayatcataagaaagacatatacacaactgctttcttgaaactgtatgtaactgatacagtgttcaaatgttttgaaacttttatgtttatgaaaracagccacatgtggtactggaatgtcactgcaaacacacgtggactggtcctgagtggcgctgagtgaggtgttcaccagtgctctcttcttacccctcttccaacaacaacaaaaacacaataagcaggtttaactttagaggagaagaagaaaatatattgaagaaaactgtcagtgtttgaatagaaggagaataagagaaaatctaacttcactatgaacagggccaacctttgcttcaggaagcagaggccatacttcatttttaaaaaatggaatctttgaagtggcttctagtaagattggtggtggatgtggactagatatcatttgctttaatttaggggtgcagaaacagtttacagtgcttcagactggaagttaatattaaggcaaggagacatgtaataagtggaaacttagccacaatggtaggaaacaaatgaaagttataaatggaacgtccccctcagtctggaaagcacacactaatagtgtagtagagggatctgagggatctttctggggttcctgggttttattttttttttattacttaaatatatgatttatgggaccagagaytgttgtatggaattcaagaataattatcatattatttaatatagagaaattattctgagcatgtcgatcccagtgtgggatatttataatccctcaaaaccaaaagagcaagaaaatgaggtgacaaaacgtacagcattttagtaacggaagaaacggatgtggcccaataaacttatctgaatttttaatgtaaaaatttagcttcacccttctgccaagtacctaagtaaaaggccaattaacaaactgtttaattaatttctcagcctctatttttctccactgaaatgaggaaacaaatgagatccaatactgaaataacagctacacattgattggtagcacaaagacaaagaacaggcaatatttacatttcttcttctgaagtactatgtgcccttttttctcttaagcttaataaactttaatgtgccttttctcataatgtttttcatatgtttactattctcttttagaaagaccaaattatttacctaatttttacatcaaaagctttcagtttttagattgactctttttttattatactttaagttttagggtacatgtgcacaacgtgcaggttagttacatatgtacacatgtgctatgttggtgtgctgcttaataaaccatgtttaaaagctaccaaatagcaaatctttcttcatataatttgtttttgagtttctcaagaagaaattttttaaattcccattactagccagataaacctctttgtttctcagttctatatttgtaagaatggatgatgtaatgatgtctgcttccctgagttgtgcaaaactgagatgagatacagaatttctagaatgatgccttgataacaatacatgtggttggactgttggattttcaagtgtgtataaccaaggctcctgagccacagaagtctgaatgaacaaagatgaacaaagtgcctttatatatgttttttacaagtggttggattgtttatatcagtggtaaaaaaaaaatgggtatacattttaatacttctatttgctttagttcatctccaacatctttatattaatataagcatctctctgattttggcaataggtgatcaattagwttttgtctttagggataatataatcttcatctatttctagatatccacaggtaatatggatagttggaaaaagctgtttctgagctacaggaaattttaaactgacattcatttaatcaacatttaaaaataacacatataaaagttctgattctactgtaataagctaaaaatgaaagtggttaatcttcatgcaacagactatacttagatcacaaacttcaagctcaccaagaaagtaaacatgtctaaacccaccctgccactcccacagcatttcatccatgctgatcaaatgggcaagtagtagaaaaattgattgtcaagtgtttcctgagtcggaaaagtaaaaaagaatgaacactggattcatcagtagaagggttttttgtttgttgattttctttttaatcacagtttaacagttttttgtttkttgttgttgtgttttgtaaatcattgtttccatgcttacatcagcaccattaatttatgttggttgatactctaggataaaagggtaggcacagggaataatatacattgtgatctccattctcacaagtcacagctcactggaccaaggaaactcttcaacacrtatctgataggtagaacatcttttttgggatccagaggctgaaaaggtcataggcagagtcttcgagtgcagatatacacagggaagtaaagtcgaggctcatgaaactgagagattacaggacggagaatatggctggtagcttttcactttccatggggccaagtgttatggttttctgcttcattttcttgaaattctccagtgtcctcctaacgggtacttcaattttttcactgacttttccattatctacagaatacgatattgggataattgcatttcctcatatgcaaaagaattctgttacactagaagataaatcaaagtatatgctcatacccttttcatgaaaatttcttagattcaaaacaaayatagttaatcaaaatattttgtttgcttttcttggcaattttaattaaattagtgtgattatagtaattccaaaaattamagatatggatgtttctttgtttttatcactaattgcacctagtatgacattaatcctaggtttcagctgttattttatttccttcagacataatattgcaagtttaaaatcagtacaactcattatggttaatttttaccttttaaaaataaatattcttaattttaaaatgattttttcttgctgctatcaccttcgagaaaagaaagccttatctattaatactattagtttcttctcagtctaatatttcttcttttgggggcttaaatttggcttttatagtatagtaagaattgaggccagaaaatgatatgattcttcccttggcataagagatggaaatttcaaaactcattacctttttgatcacctcttacccattctgtaaatgtctcatcttattaatcttgttttcaatatcttgtttttaaccaaatacttgttgcatacttcttaacacatatggccttaatttggaaattttcttgttgcgccatggtgtttgcataaaacacattaagctttttatttttaaacttcttttcatgtttattttcrattttttctcacttgaaagttcatatttacaaggaaattttatgcacatacattcttgcccctgaatataatgtaacacagacttttcctttggaacattggattgaattggccagtgttgtactgaacataaactattatcacatgactgtttttttagcttaatgtaatataaccagttaatggttatatgcccagcccttagacacaccaccccraaaacacacaattagaagcactgataactccaatagtccaaattcaggaatctcttagctttttagttgaacagctttctcatatattgccaaaatatttctaactctgggtttagactaaatagaagtaatatatattgttggatcacagtggctcattcttataaaattacttctcagtttagaataccagacttatttaatagtatcagtgaaggttaggttaaagaatgaaagccaatggaatggaggatgtggagaatttaataatcttaagtcaaacagttggaaccctcttctagaagtgacagttttttttccatttacttaaaatctctcttcaatagagagcataatatacaatataaattatttctatcaattatgaccatttagaattrttttatgaattatttaaaagtactaatttaaccaaaaaaaggtttattggttatcttctatgtgaaagtctctctgctgttaggcaaactggttaattttaaaaaagcgtgatgaagcaccatccttttcctcaataattttttaatctatctaattaaatgtgaaaatcatgtcaaattgcatagtcaggaagttgtatgtatccacattcaaaayttcttgtactgacttaacttttaaaaaaatctgtgtaagtatgattaactgtaagaatcatgtatgrctacatctactaaagacttttcaggttaartaatactattttataaaaattrtgtctttttctaatggaacttttaacagatttcccaagaaatgtaaaaatcatagtaccctctgtcctcctagcccaaaattacattatgcattttattttcatacattgtattgaaaaattttctattctgcccaacagtttatttaccttatatacgagtgtatgtttgtatgtgtgtgtgtatgtatgtatgcatatacctaattcaaagagtgaagtggtctagtattaggaaggatgcatataagagtaagctcaggttactgaccttggagagtttccagtaggagcagagacaaacttaaagtgtcataataacccagaggagatacttggaagcaaacctggggtgaagtatttcttgtttttgtctttattttatttttttttaatactgaaaacagtggacagctactggaggtttttaaacagggatcatttgattaacgctttgtgttagagaacttaatctaaattttatttagaagatggactgttatcctgggtactgtaaagatcaatgatagactggattaagaaaatgtggcacatacacaccatggaatactatgcagccataaaaaagcatgagttcatgtcctttgcagggacatggatgaagctggaaaccatcattttcagtaaactatcacacgaccagaaaaccaaacaccacatgttctcactcataagtaggagctgaacaatgagaacacatggacacagggaggggaacatcacacaccggggcctgtcaaggggtagggggttaggggagggataactttaggagaaatacctaatgtaggtgacgggttgataggtgcagcaaaccatcatggcacatgtatacctgtgtaacaaaactgcacgttctgcacatgtatcccagaacttaaagtatatataaaaacaaacaaacaagatcaacaaaattgacaaactttttactagattgaccagggcaattaagcaataaaaataaataaaaggcacacaaattgtaaaaaaaaaagtacaaaaggtctgaagaccagagacccagagactaaagagaacactgttggaatagtgttgctcctggtgaaaaatgatgaggggtgctatggtctgaatctttgtgtttccaaaatgtttatgttgaaacctaaatcaccagtgtgatggtattaaaaggtgaggcctctgggaggtgattaggacttcctccatgaatagaattagttccctcataaaagaggcccaagggaatttatttgccacttctgccatgtgaagacatggtaggaggaaagaagatgccaagcaccatctacaaagctaaaaacagccctcaccagatactgagtctgccagcacttttatcgtggacttcccagcttctagaactgctagaattgtgagaaataaatctctattatttataaaccaccctgcttatggtactttgttatagcagcccaaactgacaaggggggagataaggtggaagaatcatatgagagaggttattcccatgcagaagcagtgaaactaagaattgcttgtgagtgtatgtaaggtgacggtgataaaagataaaggtttgggagaaggacagtgagtgatgactctaagggtgcaagtttggaaaataggtggatgtcattaaaatattgatctttccaaggcattgccagctttatgagaacagatgcagagacctatttgctaatgataataatccatattttatgagttcgtcttccacagggccacaaacatgctgcagagttgccccccgaaatattgtgggaataatttttagatgtatctcagcctcttgggcaagtagacttctggaaggcctgcctgccaaataaaatagtgtgtactatgaaacctatattttacatctactgctttattgttgaccaaagcagttgtagtggagtttattggcttgttttccaataatttaaaaaattattttttaaatatttagaaaatatggaaaatcacaaaaaatacttacttgtaattctaccacacagaggaaacatgttaaattagtaaaataagtattaatatatattacatatatattcatagactatatatatacacacacacacatacatattgtgtatgtgtgtgtgtgtgtatacaccgacatagcctacccttaacttgtgtgtatgttaaatgtgtatgttaatttaactgatcccacttttgattgggagcagttattttaatataattttaatgaacattcttatttctaatattttattcatcttagaatggattttcagggaaaatatcagatcattaggggttttttgatatattatgtaagtcaagggtttttagagaggctatttccagcctatacactcactaggtttatataatattgctaaattcagcaaacctcacttgtagattatattataatataaaatgtatgccaactcgatttgcatttgatatgccattttaatttctatttgcatttgtttcgtggggctgaacagttctttcatatgtttaatgattatttgtattttttaaattaattgttgttcttgttctttgtctactctgtattgaaatgttttttcctcacaaattttaagagctatttatataagatattatctctcaaatattaaggtgtctaacatatatatgtatatatggtaggattatttttcaaagctttcttttgtgttttaatgcatatgtactttacatttatatttattaatttatgaatttattttaagaaacatcttgaatgcttactactatcagatactgttctaggcacacagccacgataaaaagcattgtcatgtcttcaagtagctcattctggcaggggagtacagatgattaaaaacacccccccaacacacacacacacgcctaatatagaagtacattttagagcatattaattggcgataaaagctatgcaaaaaaatagagaaagtgcagtaagatacagaagatgggaaatttggaggggtggtgaaagggggcaggttgcagtatttactaagtggtcgggaaggcaattttaagaagagatgtaagcaaagaactggagaagatgtgggtattactccacttcacaactgggaacagaacatctcagtctgagggaatagttacagtcaagattctaacatgtgttcaacaaacaacatgtggccagtgtggctggagataagtgagtaaggaagagaataagagaggatccttgaaggctattgtaaatcctttggctttttctttgagtgaaatggaaaaaaaaaattacagggttttgagcagtcctggcttgcatttcaaaagggatcattctgactgctctgttgagactagactataaggaggggcaaataagaattaggagacaagttagaaataatgcaattgcaatagtccaggaaacaaataatgatggtttgcataaatgtggtaactataggggtggtgagcatattctaagtatatttttaaatttgaattgatttcatgatgaattagatgtagagtgtctaaaagggaaagaaaatgatcacaaagacattcgagtgagcaactggaaggatgaaactgccatcaaccaaaatggaaaaggctatgagtggacaatatttgctggcaaatattagaatttcagtttggggcatgttatatttgagaaatctgctacacatctagatggagcttttgagtaggcagttgcatataaaagaattgggaagggatatgaagtcttcagtgaggatataataagcggcatatagatcatatttaaatscagcagactgtacaagatgataaatggggcaccgagacattccatccttaagagatcagagsagagtagtttgaggagactgagaaatagtgatttatgaagtaagagaaaactgagagtcttgagccctagagtctcaaaaaagggtttcaagaagaaagaggtgttaaatgctatatatgggtcacgtatgatgaggaccaaggattgtccacattgtcatccctttatggcttctgcttttggagttatgcttagaaagatctttaatactccaagaagaggtacatgactacctatcttttctttggcttcatttcttacaataaaatatttaacccaactggactttatttttattcaaggtgcaagacaagaatctattttctatataaacacattttttatccatttattacctaacccattctttccctactaatacaaaatgttcatccatgacacataacgtgcttaaattgkgtctgtytctggaatttctattctgtgataacaatagctgatattaataatttttaaaatcatatcttacctgagttctatgttgtcctcatgacaatcccatgaagtaatttttgtaactttttatttttaaaaaatgacataattgtagcttagcaaggttagggaagttgtccaatgtttcctacttgaaaaatrgtagaaccgggatttcaacccaactcatcttgtgtctttccatctctttagtctatttatttcgtgcaaatgccacacttttaatgaatgtgtctctatattacattttaaatctgacataacaccacgccttagtcctttaataaaatccttcttggctgggtgtggtggctcatgcctgtaatcccagcactttgggtggccaaggcaggcagatcatgaggtcaagagatcgggaccatcctggcaacatggtaaaaccccgtctctactaaaaatacaaaaattagccaggcatggtggcacgtgcctatagtcccagctactcgggaggctgaggcaggagaattgcttgaacctgggaggcagaggttgcagtgagcagaaatcgtgccactgcactccagcctgatgacagagtgtgactctatctcaaaaaataaaatataataaaatccttcttgatcatttttatgtgtattttgtctaattgaatttaaatttgttcaaaactacatcccccaaatatccattatattaaatacataatttacaaagaattgacttaatgataatattcagtcatcccatcgaagaaattggtgtatttttcaatttattcaggttattatttgtataaaaatgaaatttggttatttcttttcctataggaggcccatgattccatagatttcttctgattgggatcattgtaatacatgtttcrtttatcttcctgatttgaactgtatcttccttgagttctatcaatcgctcttcccttcattcaaatttttcataacattcttatatttatttgcatataaaagtttaaatttatttatattaagcatatgaataccttgaaaaatttcttgggggggaaccttttcttgcgggatatggaaaatattttcatgacatcaatttcctgaggtaaaaaaagttgaggtttgaagaggatgctttgagaattaggttccttttactttgatctcacagtaactacagataactaaataaagctcacatttcttagtaaaatgttttcagttcagtaaacattcttaaaggaaacatttgcttcagtaaccaaaacccatgactttcagttgaaggtccaaattaaaagaatactgtttctattctgaaaggaaagaaaatgttatttatttttctaaatagacattttggaacactttcctttgaaaatatacaaggctttatagataacagaccttagagttataagtgttaatacccacttcagctgtaagggggccaacagtgtaattttaaaagaatatccatggctgaatccactaaaaaatatgaaatattaaaaagaaggaagactatttttatttgctaagatgtaacttcaataaagaggtgaaagcaacttcttaaattttaccctgattcattattgcctcatttgcattcttttaaaaaaagacacagaactccctaaggattaagggtatgcctaaaaccatgttaattcaaaataattgtgatttacagatattaatgtttgccaaagtggtaatagtgtttgtttgcttacttaaagtcatggtgtcttattgtagaatcagagtattagaaatgtgtttctgtctcaaattccaggtgagtgagttcatataagtgggaagatgtgactactttatgaagaagtggaaataaaagcactgttttttttaggaaatttgtgtgttcactgggaaaaaatggaagaaacagtaagaaagaggcagatgaaggaggagcctctcttgagcatttaacttgaaatgttcaattgaaaaagaacactagtaaataaatatcttatggcaaatattaatactgctttacccttaggtcttggtgcacaaagataaatagataggtaggtagataggtaggtaggtagatagatagataagattgattgcttattttccaaaattgtgaaaattcatattgaaattctgttttattgtgaattttaattttaaacttgtctacaaaagttttttttgcatgacaaaaaaaaaataggttggaactaagttgcaagtagccccttgaaatagggcatgctttcactagcttacacagactgagcctactctaagagtgtagatctcacttgtctcttgtatcccacttattatttttcattttggggggtacatagtagttatatatatttatgggatacatgagatattttgattcaggcatacaatacataattttataaggataaatggggtatctatcacctcaagcatttatcctttctttgtattgcaaacgttccagttctactcttttagttatttttaaatgtacaataaattttttgagacagggtctcactttgtcacccaggctggatagctcactgcagcctcaacctcccagcctcaagtcatcctcccacctcagcctcccaagtagctgggactacaggcatgaaaaccatacctagataatttttgtatttttttagagacagggtctcacaagttgcccaggctggtcttgaatttctgggctcaagcaatccacccacattagccctccaaattgttgagattctaggcgtgagccactgtgcccagcctgcaataaattattgttggctgtagtcatttgttatgctatcaaatactagatcttattcattctttctatatttttatacccattaaccattcccactccttacgacattacccttcctagcctctggtaatcattgttctacgatctctatgagctcaattgttttaatttttagctcccacaagtaagtgagactaagtgaagtttgtctttctgtgcctggcttatttcacttaacataatgacctccagttccacccatgtcgttgcaaataacgggatctcattcttttttatggctgaatagtattccattgtgtctatacaccacattayctttatccatttgtctattgatggacacaggttgcttccaaatcttggctattgtgaatagtgctgcagtaaacatgtaagtacagatatctgttaggtatactaatttcctttattttgaatatacacatagcagtgggattgctactctatgtgtacggtacctaaatagatacggtacctctatttttactttgaggaatctccaaaccactctccgtagtggttgtactaatacaatttctaaccaacagcgtatgagagttccctttttctccacatcctcagcagcatttgttaccttgagtaaaagctgtcttaactggtgtgagatgatatctcattatagttttaatttccatttgtctgatgatcagttatgttgagaaccttttcatatgcttgtttgacatttatatgtcttcttttgagaagatcttttcagatcttttttccatttttggtcggattattagatttttcctatagagttatttgagctccttgtatattcgggttattaatccctgtcaaatggatagttttcaaatattttctcccattctgtgggttgtctctttgttgtttgctatgcagaagctttttaagcagatgaaatcccttaaaattacattattttaagttgatgtaatttgtccacttttgctctgtagggtattactcaaggaagacaaatctaagacctcaaactgtgaaattactaaaagaaacattggggaaactctctcacttctttaacctcttcaagcatttaatctgttttaaatttttgaaggaaaaaaatgttggtaatggggatgggaaatggtaaattcataaaaagaagtctgagcttcttagtaacccaagatccaattagaaagactgccttctttagtaagcagaggaattctggattcgattagtgggtattggactttataacaaatcctgttgaactgtggtaagctaaagtgattaaaagcaatcgacatgcacagacatttgctattaactttctgcttatcctttaaatcttcaggctttcacatactgaagtcaagttttcttttttcattctaaaaaggaaatcattaaatgtctctaagtgagtgtctacattgttctgacctactgtgctaatataaaaaatgaaaaatggatataaaggaaaatataaagagaaagaataatattacatgaagatcacttatgattacataaatgaaaaaggtaggatgagagtggcaagtgattagtaattgctctgtgaaagtgattcaggaaatgtattaaactgcccagattttattaggattccatattttaaataaaccacatcccatagtttcagatatatcccaccacatagtataatgcaaacaaaataggcagcaccaaaatacaagcataaaataaggaaaaatgtgtagtttatatgtgtctaaagtgttgtggttaagaaaacaggactggcaaaattgttctcagcagatactagactgcctgacagttaaagttcccatgacagatgtggaaaggctgccacaggactttcctgttgtatggtaaatggtccttgtakgaagcccaagcctggtgaggatagtccctagctccataaactcattcttttcagctgcaaaacgcaagtgtcaactaggtgatgagagatttctttcagcttaaactttgtttaagattaaaactacttaaagctgtgcatagttcaattcactggcagatggtaggcaaaaaaagagagaaattcagaggcacaaggatgctcagagccatagtattccctttttgaatttaggtagaaagataatagtaaagagtaaatttctagagaaagatttcttccttagcatctttaatgtatccatttaccatgaaaaaaaaaatgatgtgaaattctcatccaatcagtacaatactatgtgagaacagcctaaataaaaattagtttggtaattagatcaacaagctgtccactacaaatgcaaactttgactccacataagacaagcgatgaccttcactaaagatttgagtgttttgctatattatagagaaaataaatatatatatatgaaaaatttttaggtatctacatgactactcatccatatccatatttgttttcaggtttctgctaaatagtttcattttcaagaattagtttttggattatatgcaatattttcgtaatacatttttaattattttaaaacatatatttgttcctttataatctgtgaatccaaagaagtcactgctcagtaaatgtgtaaattttctctctaccatgtaaaatttgtaggattattcatatatactattttatttgtcctttcacttctcttctccagtttaaaatgtctgtagaaagtaagatacatttcttaccaaattctgttcgaaagcctttattgattttcggtagaactttgaattccttcatgagccatttcacagtatcttatttttgatgtcatacggagaggtgagaaggtagagggaatgaaaaagggcaaaatattatacatgtagcagagatcaaaatgtaacaagagattattgtaaaaaggttatgccaacatatttgaaacttaggtgtaaaataaaattcataaaattatataaactatgaaaaatgaaaaaaaaaaaacagaacctcactgaatcagtagctcacatatttttccacaataaaaacatcaagcccagatgctttataggttagttatattgaatgtaaaataagcaagtaattcccatattatacaaacattttcagagaatgttaaaatacagaatcgactctgtttgatttttacaagtaatatattcctggttccaaaatcatataagaacagtatgtgaaagtaaaattatggctattgtcactcatgaacattgatgacaaattctaaacaaaacagtaaaccaaatttactaatgtataaaaatgtaacatcacagaaaagtttgttttgttccagggattcaagtttggctttacattagaaaatttattagaagtcactgctttaaaatactaaaattgtaaagatatgattatctcaatggttatataacatatataaactgtaactcatatatttacttatctattcccccattaaaagacatttaggcatccggtactttttactattcaatttttgtgggtttttttggtccatcatttatttatatatattatatatatatgtaattacatatataatatatgtaatatgtatatgtaatataatatatatattatatattatatgtaatatattatatatataatatataatatatattaagataatatatatttagataatatatattatatttagataatatatattatattaatataatatatattatctaaatataatatatattatataatataatatatattatatatataatatatattattttatatataatatataatatatattatataatatatattatatattatataaatataatatatattatatattataatataatatatattatataatatataatatataaatataatatatattatattataatatataatatatatattatatctattatatatatatgatatatataaaatactctaagttctggggtacatgtgcacaatgtgcaggtttgttacatagaaataccatttgacccagccatcccattactgggtatatacccaaaggatttttgcccataatttttataaacaaggcttacacataaggacagcgaattcataatttgatttaagagcagctgttgttgtagaggccccgtgtgatgttagatgcagtcattctgagttccactgttctgccccctcctaattcatttcctgagtccagtataaccttgatcacaaatcctacaagattattacaagaaaagaaactcctagccaaatctatttcactgtatcctaataaaatatttcaaagggaatttagtgacatattaaaagactaatccatttcaaccaagttggatttatcccagaaattctagtttaacatataaaaccaatcatagaattaccacattaataaagaagaaaaatcttgtgattatctcaaatgatgtagaaaattatttgacacacttagcaaagtaggagtttctagccagtgcaataaggaaaggaaatgaacaaaatgtacaagttgggaaggatgaaatacaattatcattatttcaaatgtcataattgtgtattcaaacttccaacataagttataggtatactattaaaatcaatacataaatttaggaagattgtagaatataagcacaatatataaaaattacyggtactgttatatatactagtaacaaatattcattatgaaatgaaatgacacacttccaattgcaatattattaaaatatggtaaggcatagatttaacaacagacatgttatattactatatagaaagtaacataacactatgaagagaagttttataaataaaagtaaacagagagataagtttcaggcttggaaggctcaatattgaacaaataccagttttcaccaaattgatccatagattcaatgcaagctcagcagatctgtgtgtgtgcaaggaattgacaagtggattctaaaattgatgtgagaatgcaaatggcctacaatagccaaggcaatcgaaaaggggaatttcaaatctgaagaacttatcagataacaaatcttaatataaagctaaaataattaagatgtgtgatagcaatacaagaatgggcatatagaccacaaagaaaagagagctgagaaagaaattcagacatatacagtcacctgatttgtgataaaagcatcactacacttcagtgagaaaagcatgatcttttcaataaattgtgctagttcaattggatattcatacagaaaaaaaaatcttaatcttgatacacaaagattataagtctaactatagaagtaaataacatgagagtaatattttgcctagagagagacattacataacacatgagaaaggctaacagtggaaaataattgataaacaggctatattacaattaggattttctgctcataaaaagatacattgagtttctatgttagctccaaatgtaaagagtttggaaatcacccttatttttacggcatggacaagcttgaaaaattgaactgaaataacttttcttggatctatcagaaaactgaggttgaagagcaaacttctgccctgaaatctggagagagaggcaaatccagagctgcagatttgagatcttcttaactgcctaattttgacaaattgctggagtctgagtgtggataagcataaaagtgagaaacacttgaagccagagttttaagggggtcgctaattttgtgagtcttaccttctatcaggatctaaaagtgagaatttgagaaagacctttttctgtgaccctggcaaggagaggaaaagaataatcacttgaaatattatcagaatattcttcattacaaaggcctattctcaatacaaagaaattactagtaccttatcccagctggggaaagggtattcatcattctccagcccacaatagacttcctgtagtaccacagggataaacaaaagttgataccactggagaaacacttgggaaggtcaacatttaaaacccacaggcccactacaagtctgaaatttaatcaccagattaaggaatgcttctcttctttcacaccttatcaccacaccgaaagggctccagtctaataacagcagattacagcagaaagaactacaagaagcagacccgtttatctgagaaggaatacttaggaaagcccgccttatatagaaaaggcaaagacaggaaactagagaaatttgaagcctctggcagttacagctgcagcaaacattaaatgcaaccaaactcctagccagataaacatataatctcacacttacagcctgtttacctcagttactattaccagatacaatgtgtaggctttcaacgacaacaacaacaacaaatcaaaggcagatgaaaagccaataaaaaatacagcctgaagagacaaagcaaccctcagaatcagactcagatatgacacagatattggaatgatgagacagggaattcaaattaactatgactaatatgtgaagggatttattggcagaagtagacaacatgcaaaaaagagacgggaatgtaaacctgtagatggaggctctaaaagaagaataaaaaagaaatgctagaaaaaaaaactaatagaaatgaagaatgcygttgatagactcattggtagactagacgtggctaaggagagaatcagtgagctgaaaaatatgtcagtagacacttcataaaactgaaatgcaaagaggaaaaattaatgaaaaaattcataacagattgtctgagaactattacacgattttaaaaggctctgtagagatccattatgtatgtgtaattaaaatgccagaaggagaagaaacagagaacacagtagcataaatatttgaagcaataatcgttgacagctttccaaaattaatgacagccatgaacccatagatccgggaagctcagagaatgtcaagcaggataaatactgaaaatcaatagctaggcatatcatattcaaactgcaacaaaacaaagataaacagagaattttgaaagaagccagagaaaaaatacaccgtatctatagagaaatgaaattaagaattgcatttcaactgtccttcagaaaccacaaaagcaactagaaagtagaatgaagtaaagtactgaaagtaaaaacccaccagtgtagaacctaggattctatgttcaataaaattactcttcagaagtgaagtagaaacaaagactttttcagaaaaacaagaactgaaggattccatcaatatatctgcccaactagaaacttaaaaagacagtcttcacaaagaaggatacttatgtatgtatatatcagaaaattagttctacacaaagaaaaataagacatcagagatgcaatatatgaaaataaaatataatcttttattttaattattcttaattcatctattaataactgttcaaagtaaaaatagtaacaaggtacagggtaattgtagcatatgtgtaagtgaaatgaaggataataatgttataaaatatgggaggaatgaatttgggatactttattacaacgtactggtgctacacatgaaatggtatagtattatttgaaggtggactttagttaacaaggtgtattggaaactgtagataaatcactaaaaattttaagaaatataaatgatatgctaggagataaagtacaaaagaatcatataaaattatcgattaaaaccagagaagattgaaaaatgtggagaaaaaagaatgtaatgactgtaatacatttataaatatggtggatattaatccacctataatccaactacaatcatttcaaatgtgaatggtctaaatttgaagacagaggttgccagcggattttaaaagcaagacccaactatttgttatctacaaaaaatccattataaatatttaatatactcaggtatgttaaaagtaaagggatagaaaaagtatacatgacatactaacaccaatcaaatgaaagctggggtagcaatattaattttagaaaaaagtggacttcgcaaaagaaaaaaattatcaaagatatggtagtatgttatataatgataaatacattatccaagaagaaataacagttgtaaatttttataaatctaacaacacagcatcaaaattcatgaggtaaaatggaaataagaaataggcagattcactattatagtttaaaacattaacatacttcttttggtaattgatatatcaagcagacagataatcaacaagaatatagtttatttgaacagcactatcaagcagtttgttttaattgacatttgtgaatcatccatacaataatatcagaatacatattaatgcaagatgttaataacaggaggaattgggtgtaggtctatggtaattatctgtaatctcttcacaatttttctaaaaatctaaaaccctattaaataaaawttaaaacaaaaatatatattataagattgaataacaagtcacaatgtgggaaaagatattttgaattaatatayatgacaaaggaatagtatcaagaatacatataaaactcctattaatctatgataaaataamtattaacaggtcagtggtaaaatggacaaataacttgaagagacactgcacagaaaaggtgtattaatagcaagtaagttctgaaaagtcattacacttcactagtcatcagagaaatgtaaattaaaactacaatgaaataccaccacacagccaccagactggttgcaatgataaagtctgaggtacaaagtactggcaaaaatgtgraacgaatggtactctcacatattgctgttgggagtttaaattggtgccaccactctgtaaaacatgcatacattagaacccaacaattccattcctaggtatataaccaatagaaatgtatgcatgtattcaccaaaagatatgttcaagaatgttcacactagtactctttatagtaactccaaattggaagcaacacaaatacatatcagtaataaaatttgtacatagattctgaatatatgtatcacttatgagaatgaaaaactgctacatacaacatggttgaatttcaaaacaacatgttgaatgagaaaagtcagacatgataaagtatattgtttgattacatttttataatattcatgaacatgcaaaactaatccatggttatagatgtttacacaggagtaggataataagggagaaggtgtgagagcagcatgagaacatgctgctaatgttcaattttctgacctgagtggtgttttaactttgtgaacatttattgatctgtatacttatgatttgtgctcttctctatatgtatattataaacttaatagcttattttaaaaaaagaaaaaaatataaaaattgttaagaattacatcagtattactcataaaagggaacacaaatgtcacataaaatatgttcaacattaatctgaaaaatgcaaatttaaatgtgatttcatgttatacctggtatattggcaaaaatagaaaagccagacagtatcyaatgttggtaaagatgtagacttacagaaactctcacatactattggtgatttgtgcacatgtgtactctatgacccagcaatttattccttggtatatacctggtaaatctcttgtatgcagcagaagacagaaaaagagtttgtagcagaattgtttataatgataaaaactgaaacaatttttcacctctaaggaattggatcaaactgtgccatattcacrcaaatgaaaatcatctagtcaagacaaggaatattgacagctatgtgcagtcacacaggttgaactgaaaaacccagtaatgggtggataaagcaagttatcgaagaataaagtaatattctagttatgtaaagtccaaaaaaagacaaatttaccaatcatattataacattttaaagtaaaacaggagaatgatatgcagaattttctgggacagaggggtcattcgatgaaggcaggcttatatggagattctaaaatattgtaatgctgatatggtttggctctgtgtccccacccaaatctcatctctaattataatccacaggtgttgagggagggacctggtaggaggtgatttgatcatgggggcaattgtcctgatacagttctcatgctagtgagtgagttctcatgataactgatggttttaaaagtgtttggcagttccctcttcatgctctctctcctgccaccatataagatgtgccttgcttccccttcaacttccaccatgattgtaagtttcctgagacctctccagccatacagcactgtgagtcaattaaagctctttcctttatgaattaccctgtctcaggtattttatagcagtgtgaaaacagaatacatactcctatttcttaaactgcatggtgactaaaattatgttcattttattgtattgtgttttaaattgtgtctaccttaaatataattgttatattaatggtagcagaaatctaaaagttaaagaaaaaaatgaaatatgtcaatgtaaccattttgggactttttgccaagatttcctgaaccaaagctatcaattacaatattttaaaaaacattgtgctaactcctaaagttattttagaaagtgtccatctgatatctttcagaccatggtcatttgagaacacagtgaagagaccaacagagtaaatcaccaggacctgtttacacaacaaaaaatgtggctggtaaaatattctctactgatgtttctgtaaccagagaccggaaacgtacagtggaaatgaaaccctgtactattctagtgccaacacaaacaacaattatagtgcgatgtgagaaaagttgtaagaaatatttctgggtttcagtggttcaaccaagtcagcatatttctgtaattgtggcagattggacccaaaactttagagtcttcagcaaggaacgactcttagacattaaagtgatccctgataaaacaaccccagggtcatgagaaggctactctgccaatttcatttcactgtgggacccactgacatctggctcagctgcggaagctggaaaactttaaaattctcttgacagtaaaaatggacatgtggaaaacattctaatcggttaatctttggtgcttctgaaaaagggacatttggctttatacttcatgatgataaatatgaaacctccagatctagttgtaaataacttaatggcatttgaatatggaataaaattttcacttcccaaatgtgccaaaagatgaatatgcacctgcatcaaccccatgacataagaagccccctggattctttgtttacacttgagttttataatttgtccaccttacattggttccatttggccagtgaaaatcagtgaacagtagcaagtcatttattctctttcctcatcctctcttcttttcctctcgacttcgctaactctcatccttgctcaagcaattcctctctctccttcccttcttttctccctcctttccattttattacatataatcaaggaaatcaagataactaacttcatatatatatatacacacacacacacatatatacacatatatacatatatatgtatatatacttatatatgtatacttataagtatatatacatatatatgtatatatgtgtatatatgtatgtgtacatatatatgcactatcagtaagtgacctttaggatcactgcataatatattaggatgtgtgaatatgtagatgggaagcaaaaaaaattgtacttccatgttatgggcttttcttaaataaatgtcaggcttcaagatcaacaaattatagaagctgtctctatcttgtaggtttttctttttgttgtttagacaatctttttttcttttttttttttccagttcttattgattccacttaattcctcttgcagcattaatatttgttctaatttcaacatagtacttcaaaagctctgggtttaaactcagaaaactaattagtgaagaaaggaaatgctgcacgatcaaatagaggcctacatagttccctgctaaatacatgctattcaacaagttttctttcccctacctccaaacatattttgtagtctctagtcaaatatgcacatatataagtgcatagctaaatgaattaaaggaaataaagtgcagctattgcttctgataaatcaactcatgatttttttcttcctgattctatctggtatatgttaggtggtaaaaaggagagtgtagcatagtagttacaagcactgcctctaaaatctaaatgtctatgattaaattttgattttgtcttcttaggcaaattacttaatttttctatgctccattgttcccttatctgtaaattttgaatttcaaaagtttgtacttgtgagctgttgtgatgattaaatgaatgtaggcacatattaggcactaggggtgttagcttttctcgtccttctctactggctccattcctcagctaacagtcaatctaatctccatatcagaatcagaacagtcactccatcattctacctttccactagaaggttggcttctctcaatcctgagtctaaaagataggtattataattggatgttgacacatctcattatgacagcattcttttattcctcataggaattcatcaaacatctattgagcaccttccataaggcattgttctctactagatgctagatttgactggttgttctataactttatgatgggacgtgtttgtatttgggagatgctatcaggccattcattttcaaaaaattcaaaaagcattaaacctaaatttattgttgccttacaatatacatcgttagacagatctcaagttctgcatacagcctttagtggcttcattgcaaccttaatatcgagtctgcaaaagagatcccaacccttgttaggttgccctcaatctgctactgcagccttttctcttgtcatgctccttctcattcccaaatcccctggactgggggccttcacacaggcattctgtatggtccacttcactttatttacctctagacaatgcctatttatcttttaagtcataatttagaaagacttcctgaagaggtgtttctaagctatgctcctgtaccacatggcacctcacctgacagtgtgctgttcacatagtatcttcactgcttatttacatatcagtgcaccactcattagtaaggagaaaggctgtgcatcacagttgatcgtagcctctaccaccgggcctagcatgtagcatatgctttatgttcaacacctatcttcagggaatgattcaatactgtcaagatatagtttcaacagaaacactccattttttatatcccaatgagtaatttgttttaactcacttaatttccttttggaattgtagatgattactcgatgccatagtagctagggatataaaatgaagaacatacctgcacttaatgagggtatatgctgggagtcttggcaaagtgatttaaaattcagaagctctctgtttctaggtgtgccaattttccttaatggagctcttgctcttatctgtatataatttcgttctagttgggattggatataaagtggagcagaaatgaaatagtatccacttaggtggcatggcaacttatttccacatgcttgtacgtaagaagcctggaatgacatttggtttaaacatttgcaaaaaaacatgaaaatattcacatagaaaaaatatattttgtattacatggaggcaatatagttgatgtacatgtgtaggaatacatagaataaatgtttttacacgtgtcttaaagtgagacctttattagttgatgccataatttcacttcagaaatgtggcttattagaagaagcaatgccttgagttgaggaagaattacctaatttatagacaaggattccaggcaaaaagacattatggtaaggccacggaggttagaaacagtgtaggggaatttacaagaaattttatgttgttgaagcatcaagttcaagataatggtaacttaaacaaagctaaaattatatcatgtaagacaatgataaatgatgaggctgaaaacacattctgatgccaaaacttcaaaggcctcactagtaaaggtaaaactcttgaactttatccagcaggtgatggaggaccacaagagttttaagcagggaagtgctatttgcacttcagatttgtattttagaactctttctagtatatctatagaaagtagatttaaggaacataggacaaaacagatcagatcctagactctttcagtgaatcaagaaagaaatattgaaggccttgtgtgtaaggtgtgcatagtacagaggagtgaagggcatattggaaattcatttaagaggtagtaggacctcaagattgacttaacatggaaggccagagagagggaagaaacagctgagttgcatactttttgcatgagtgactaggtgaccaatgatcaaatgttgtcatgtagagacatttgttaaatgcatagctgtcctccagagcagacacttgggcctaaactatgccaggggcagtagaaataaaagaggcaaagcataaaggtcattgcagattctcaaagcagattctcaaagcggattctcaaagcggattctcaaattagctcaaagaaatggaacttggtcatcagtttcctgtggaacttgacaaagctcttgttcttgatgctgcctctctcattcccttcagttactactgctctcaggttcatctctcttcaagcttcctacaaaaccatgtttcttcctgcatagctagtgttattgcctcttaattagtcaaaataattaagtccatcaggcataatcttgctcagattcctgccccacttcccatagaggcttgtagggttctggatctcaatactagtaggcctcagaaaagcaagatctctacaaatggaccatgttgtctagaatcttacagtctggcatactttcagcaagcttttatttttaccttgatatgtctttggaaaattgttaacttctattagtaatatccttatacaataaaggttaarggcagtggttctggattcagacaatccttaaagcatagatgaatatacatggaaatataaaaaagaaaaaaaatcctcatggaaaacaagaaatagtttcagtgtcactgattttacactcttacaaaatggaatctcttaagaatgattacattaccaagtaaggtttataccagaaataattgaaagattagttcagtctctgggaattaacgtagtcagaacgttaccagattagaggagaaaaatatttcttaaggaacacagaaaaaaattgataaaactaaacactgtcttataataaaattttataaactaagagtaaatgggaaccacctaaagctcataaagggtatctaccagaaacttaccatgaatatcatatttaatgattaactcttagaaatagtatcaatttaaaaaatcaagcaaggtacccatcactgtttcagcattacagaggagatttaagccaatgtactaaaataaggaaaataaatgataaaaaataattaggaatacaaaaattatctatatctgcaaatgacttattatctataatatgtattctctttgattttcatatagtaatcatatcatttgcagtaaagataactgattttgggtgtgtgaagtaatggctatatatataattaatggacatacgtattaatgtgtatatttatagtaataagagcatttgacaaaatttcagttggaaatagtaactgatcaaacataagagaaaaatacaatattcaagttagcagcaaaaacaataaagtactarragaaaccaggtatgtgtttaaaccaaatacatattaaaacctttgttgtaaaacctgtatatcacaattccaaaatgtttttgaaagaaatacaaataaatcagaataaatgactagatatataatgttcacagatgaatgaatttggtatcttaaagatggcaattgtcctggttttgatttataaactttcaagtgaaatccctagcygtcttgttcgtgaaagttgatgatcaaatttaaccttcaaaaagaggagtaaaggagtaaagagcacagagtaaacaagacacattttagaacaagagaggagaacttgccttatcaggttgaaagacttaattatgataataaagcagcctccaggactgattctatcctgaaaccaaggtaggttcacagcgcctgggatgagatgagtagcaaacacgtaattccaaaaaggctagaaagaaggagagggtaggggaaggcctgggctctgagtgtcaaatctcttaaactggtaggaatttgagtttacctgtaggaaattttgggagcctctgtaggtatgtacaaggagacttgtttaatcattaatcttgagtagattattaatctgaatgaaactgaatcaaattcagaactgagtgtgaggctaattattgtcatgcaatttgcttgtgttttggagaacttggtagtaggttatatttattaaaaatatcctggaggtggttatccatgtatgtacacagaagcctggcagtagaaacggccttttaaactcaaaaaataattaaaccactaaaagtcacattagttagtgttatggttgcaggatagaatttttacatctttcactttttccttttcaatatgatttctacttgcaactaggagtctaatatttttatctaaaataatcttgtgagattttttaagacagtaaattatctttataaaaatctatgacatagacagatttaattatgctttcagttgatattgtacattagtaaattaagagaattaaattctcttggaatttaatgttaatattattcacagctattgtccttcaacatgcatatctttcaaaatgttaattctagataattctacagagcccctttaccaatttaatatttaaaattcaaagagtatgaacaagtgaggaatgaaacaagctattatcaaaatatttcagtctaaagcgttgggtggtttctggacttctacctgttttatattctcattttttcttcctattttttttatgattctgtgcatacaaagtattgccctggaggtgagacttaaaacattcaaaagaggttgaaaatattttattctgaaagtatatcccaactattctctcaggaaagcaggaatacgtggagcagaaaaacggacagctcaatcaaaaacagaacaacaaacaaagctcactttctttccatgattattccatctggagagatgcctaggggttactagatttaggaaaagaggaaagtagacatttwgtttcaaatatgtaaatgtctgcagttgccccaatgtttgaagccaaaaatgttatatttgtattattatattttgaagcagttgtattacaatttatttcacttcaggaggctcttaggaaatttgtatattttagaataacttttctggaatwttctctttagtagagagttctaaagaaacctgaggcataagagtaaataacttaaatcatgaaatataacatcttttaaaatttatttttaaataaccatgcaattttcacattgtaagggccactttttcatgtatcatttatctctcttctcagctaaagactggggcygggcacagtggctcactcctgtaatgccatgactttgggaggccgaggtaggyggtttgcctgaggtcaggagttcgagaccagcctggccaacatagtgaaaccccgtctctactaaaaatagaaaaaaattagccaggcatggtggcatgtgcctgtagtccagctactcgggaggttgaggcaggagaattgcttgaacccaggaggcggaggttgcagtgagccgagattgcgctactgcactccagcctgggcaacagagcaagactccatctcagaaaaaaaaaaaaaaaaagaaagaaaaaagaaaagattggactcaacaccaaaagcccagcataactcctttgtgagttttgaccctacatattgttccagttctggggcgattccttgtacctttcatgcacaactttcctttacataaacgatgtttttaattgtgatggagtcagtgctgtgtctacacgttctgcagttaactactcctgagaagcctattgactgaaatgtatagcagcaatatactacctagaaaactgatatatgtgagttatacctacaacataagaagtttgtataattagtttaatagtaagtggtgttcaaaataattattagacctttctatggcagcttacctaagcacaggtaaagatggctggcattttcattaaatgctctaagtctaataattatttgcatgctctaggttagatacgtttaaataatttataagattctattggcacaatatatatggattatgttttgaaacttaagtctctagaaaaattaaagtctctagaaaatttaaatttaaatttctggacaaattaaaatcatgcagttgttattcccaaaatagggtgtgaaggcagatatgtgagggagagaggtcatgggggcaggggagacagctaagatgtggtataattgagaaagggaacaaacccacggactgaagacatgagcatacatggtgagcataggaaggaaggaagttatttcgtatgtagttgcaacagataaagatgagaattttaagaaagggaaggtcccaagagagcagatggcagcattttagacgaggagtaattcatgttttagaaaggtaagcatagagaaggaaagcagtctttcttaccacatttccacatttatgaggtattgtcatatagtcttccttatttatttatcctaatttttgacagaatttggcattagaattacccaaaaaccccataatcgcatgaatatatggcatatctgatggtctggaaagattgtttggtgttgatttgctgtatttggtaggaatgtcatttatatggaccacaatgaatcatatgaccctactgccatattagttaacaatcaacctgaattatattcttttttattttttcctgctacttaattgtcttcttctaaaactagagatattattgttttcattagcaaggtgctattgagtagttcttcacaggtatatattttggaacatccagagtaatcacttttttattgactatcttgagtactttttagtttatttcagtctaaatagtcaaatcaagtgtacctacatttaaaatatgaactattactttgcttatatcttgatctaatttcatggtgctttaagttctgataacatcatggttaccttgtcttgtttacaggatgattttaatttaaaatgaaataccaaaaacaaaccagtttatagccggtacatttactagtcaaagcaacttgaaaaataagttagttatattcttgttcttaccttattccaagtattctgcctaaaccttactgtatttcaaatttagcagcatcttcatatatttgatagcagcctcccccatccaggcattgaaactctagccaaactttcatggtaataatagtatttggtggacatagtattattttacttggagaattacaatgtgatttgcgtttcttgtttcatttctttaaactttaaaagtactgtatatgtgtttctcccagttggagatttcagaaagctaaggaatgggttccacatatttcttcttttgactcttcaaaaaagcacttacaataaaaaaaaatctttacttccttagatgacggtctagattactaaaaaaaataaatagtagatcattattctttagaatgttcacattgcttgtcaacaaagcactccaaaatagatgctatttgatacaagttagattttttttcctacattcagggcagagagttaaattatttttcttccaaatcctgtagcagcaccctaagggcaaagagtcttaataaaacacattaagttgcttttcatgaaaaaatattgtgtcttatattttatatgtctcctagatatttcttactttacgtggttaaatatttcattgttgctagtgttataacaataaataagcaatgttgacattaaaagttactgtcatactaaatttcaaaaattgctgggttaaaaaatactgacaccaaaaaagttgcataactggactacagagctcaartaacaacagaataatactgtcccccttacttttagatatggatggcaattaagtgaattcaatagatttattttagaaaagtgttttgccatggatagataaacatatacaattttaagcatgtgtctatgtatgtattttttttcctagtaataggatattatgttttcttcatgttcttagaggaatctatgacttacaaaatatttagaattgtgatttataagaagagcttttttggtcttgaaaaacatgaagatttcttgcataataaacatacgctttttgttataatgtttataaagatgcggctgataaaaacagataaagtatgattaaaattaaactttagtgctttctatgagtttcaattgcctgtcatttgtctctagtaatgtgaaataaattggttgtatacataaattatttggtttagagctaaacaccaacttgaagataaatgatatttttggttttatatatattaaaataaattagcctttgtgaatatagctatactttatggtacttcattttatgcatagttttctacatttgttatccttagtgagagactgcctggaagagtcccacctctctaaaatttctaaaacacagctatatattacagaggcatgcatgcattcattagatggttcaaaacccttgatatatattcctcctggacacatgggatcatgtgagtaattgataaaagattaggtaccagcctaaaatactgagcaataacagatgtacttttattaagaaatgccatagtacttacagatgttctatagacattagctgaaatgaagtttctctaaaatgacaattcaaagttaaacagttgctctataatgtaaccaaaatacaaacatatacacacacatatacagagttatatagccagatacagatatatatctatatatttacctacctatatatttatctgtatatatattcaacaatataacatttgagtgaaatttgaaaagtgtttgtttgtataggcatcataaggttatataaaacttattctagtgagcatctgatttatacatctcaatttactgcatcttactcttatttgtatccctctcagtggattgtacatagaaaccacttaataaacacaaatacattttaataaatcgttattaaatagtgttttgggagacttgtaccaaattgtgctacatagcaggagggatccagcattatgtcagagctaacatcaaaaacatcagtaaacaggaacctgctattaacaagttctgtcattgacgttatttatattttttaaggtctgctccccatgcctcactctctgctcatagaatctccctacttttcaaggccaagttcaaatgtcatttcctctataaaacctgcctcaatttaaacagtctaaaataattttcttcccccttaaactcttaatattttcctagttggcctgaattaacacttctcataatctgccttttaattattcatgtatacattatatcttttctactagattctaagttgttttgagtcaaaggctacatcttaaatatgataatgtggtaagccttttgtgagtgaataattagtacatgttggctgattgcatgatttactctttagctgacataaatacaaatgctcttctaaaagctaacattctgtactaattttgacaggagaggaggctgctctgtgaaatttgaactcattcaactaatagatatttataaaattcatattgcactctctagtaagaagctaaaatcttctgttataaaatacaggagatttttgtttaaacatactttatggggcaagaaagtatacatgtgacccaaattacccaaattaatttgttaatggcttcgtatcagccttggcccatagcatactccctagtacatgtrgtttactcatccaaaacagtgtagtctatcaaacagcaaagtcttttgtgatatggaagaaagtgcaatgcacaaatacataatattttctattctattcttattaaaaaatgctagtggggattgcaatgtgattcactaatgatactgacttgattagtaaatacttattcataagacacggccctgctacatgtctgatattactttgcaacactgtcttcrtgactccctctactccaagcacagtggtctccttaattctctctaaacacaccaaatactcctccttgtcaaagcatttgttctgaccgtcttcatttttgcctaacacactattatttcagaccagttcgtagttaacctcccacttcgttcaggtttcagctcaaatactccttcatcagaataaaacttttgggagagtgatttttattaacccaccttgagtcacacatgcatctctatcctgtcacttgctttcctgtatcactattatcttgtttaggctttagaagtgtttttcttccccactaaaaactggctccttgaaagcacagattttgtatgctttattttctactactgtatacgtggcacctagaacaatataagaactcaataaatatctgttcaatgatatgatgaatacttgccactagcaagcattacttgtcattttaaatttcctaaaagcaaagacttaaggaaaaacatgagagtttaacagtaataaatcattttctggtattacactttcaatggaatatattgaatagtttctagaaaaggtatctagtgaatatttattgtttagtatgttcaaaatacaccccacttctaggaaaacatgtcttcatcactccaaatatgtggttctagtgaggacctagaaattgcagcatccttctctcttcctcccacaatgtctagcttacaaagtgcactcatggccccagtgagggaaattttcgtattctggtgcactggcttcaatttctggtccacagatggatgtgtgactcaaggtgggttaataaaaatcactctgccaaaagttttctagttagagcttatgaaaaagagttcctttctcttacataaaactctgtgacttttgatrtagccgacttgaaaraataaagccaacacacagagaagaaaaaaaatgatgagagagatgaagagagagaacgaaggaaaaaagaagggaagaaagagacagaaagtaggatgttggaatctctggttcagtrtttcccaagattaaccaaccaaactttttctataattcacttaagggaaccaatgaatttctctcctgcccttttcttggctttaataactcaaacttcttatcctggctaatatataataaaataaatggacagtgtctccagtaggggtttttagaataaatgtggggggagggaaaatcctccttaacaagtctttcatttctgtgtgtatttatttatttattttcatgactttgaataacctgaaaatgggattcaaggaagctatctctgcaggagtctgagctaatgagatccagaactttctggtgaaattggcataaggacagaactaaaatacttagaagaggatagacagtgaatctcataaagtgcctttgtttagtatcactttgcccaatctgcctttgataagagtttggtagaaaataattcaagtttcaactccttggaaaggatgattacatttttctgggatcagtcagaaagcagaagacacaaaaataattgaatgtaggaaacacaggtgaaaggaaaagtataaaactgaacatcggacaaaaaagcatcccagaggttagcaggacctagaatagggtaaggcaaaccaggtaactagaacacaacatttaagaggcattctttctcaggtgctgatgattttcaacttgctcaccaactgagttgctgaatggcttcctacgatttgcaccctgtttgcttcactgttaaggaggcactcctggagattagcaatagcaggaacccaccgttgcaatagcagtgagccctataggctggatggacaaagaaagaagcagtgttactggagcccagcatccagagtcactgtgagagagctggaaccatgctgggcctgtccatggtcagcagaaggcattggaggacacaaagaaaatatgggctctacttgagataccacccaaagctgttagtgggaaatattatgacttcttcctaacaccagagcttactgttggctgaactctgtaggaatccagctgatatgagaactggggaaatgcatcctgaaggaatcagtctcctgtgatgaagagcaaagacgtgacggacaagaaagaactctttttcttccttggacattaayctgtccatgattaatattttgtgtattttcctgcataccccatgtttatgtgaagtaagtgaaatagcacttgaatttgactcatatctaaagatttttatctcatatattttcatttttaagtaaggatgacattgaatttcaggtatttcgaatcgttgaagttaaaacagaagcataaaatatgttacagtttacacaggagcttttgtaagcctagtggtacttggcagctttgctacaacaccaaatatgtgtgggtttggcactcctcaatgagaatcttcagcaaatgttttaagagttttgtcttatatgacttttttttcttggctattagcactggccatcatggttgtatgccatctggaagcttatatgcgtgtgaccttcccattaagtcactatatctttgcttggcatttgtatgccatatcttcagatgccaagggaatgaacctatcacaataatgtgttgccccaaattataatagcaaaagcccttaatattctaattttatttgggtatgtttataatttgaggacataattagataaaattgagcaaaccaacttcagtacgtattcatagaaagccataggattggagaaaatcctagagccatcaaagctgatggcttcactaacagtagaagggattccttctgcaacctttagattgtcttttaatacttcagtggcaaggctatcattattttgaaagctaactcatttgtgtttgggcagcattaaatggctagagagttatcccccataatcaaccaaaatctacatctgtctatttggctctggaatcatacagaatatgtctactttcttgaccacataatgatcttgaactatgcaactacaactctcatttatctctcagccttttccaaggcaaatatccacaattgcctcaaccatggattatattatgttttctagacatrcgagttttctccaaatctgcttttcttctatatatttaactgtaattatacttatgtttattttcctaccttctttgaataactggcttcaactgcaccatttcgggtgccttcaactggactatttctagtggcagaaaaaaaaaattattttatatattcacagccttccctcttcctccaagatgtacccaatgctttaaaaaattaataccattgttaagataaatatcttgttagatattttgatcaatggtgggtctcaagctagcaaggtctttggtaagtcatttagaaatcaagctgaacttgagctatttgaaattaacaataagaatgtgaatggtaatactcatataagtaatatcataaaatattctatactttttkatttttatttttttagagatgggggtctcactctgaagcccaggctggagtgcagtggtatgatcatagctcactgcagcctcaaactcctaggctcaagtgatcttctctyagtctccccagtagctgggaacacagacmtgagccactgtgcctggcctgtaatattttttgtacttwatagcatacataatattttatatctatgtaaaaacacagcagtgtccagtttaatgaattctgamgtttaccccccaaatagatgtctcctaataaatggtggaatacatgtgtaaatccgcttagccacttctcctttaaaacagatttcaagttcctcctattctctttctccttcctcctatgagtgagctaagtttgaagagggcttaagtatcatcctggcattagtggggagttacctggtctgcaaacrttcttagtcctcccttgtttccctggagatatgactattcggcccattcagctctgtccttgtgatggtacccaaaccatgatccatccaactctagcccatactctgtaccacatcctggtcatgattttagttccctcttgcccaccagtgatttttcagctctgctagggaaaatgggaaattgttgtaagctttctatgccaggtttgagtgttctgtattctttgaagttacctgagccactggctaggtatctcacttagcctttgctgccctgttacctctgtcagctggatgctgagcttctgagtcttgtatgccctccagtatacacctttgaaagcaagaccagtctcctttgttatagggctccccaaaacccatataaaattcctatcactcattatccctgcccccacccctggtactcagcatatgggaagcctcgtgctctttctagagacctaggaatcactgtgtcctatcttttaaattattttactgaccaatggagtccaattatttgagttacaagaatgttaaactataaatataaacattaccaaagacatgaaatcactccaactgcaaatggggaagtggaaaaaaagttatttaatgaaagataaatgtgaatttaaattagttttgaataattaggaatgcttcaggaaacgtggtaaatagccagttttctatgtctataatgattttcaagaaagcaactttcacctttcactaaagatgattctatatcccactccagttaatggaccaccctctattaagttgttgttaagcgagagatctcagtgctttgttaatggtatttctttcttcagtcattcctcattcatttagacagtattttacctagtaaatttatctcaaatttattccttaacaacaatctttttycttatgcttcaytttaaatagtcatcactaatgattkgatgtattgcactaattttctaacaaatgtttctacttacatatttctcagcctctatccatctcaattattgctcccttgctagcaaaattagaaaataaaagtgctgatgatggcatgattattcataaaccttagatagaccttcatttcatagagaataaagctcatatcctatagcaaggcacagggcttcccatgatcaggaactatgctccatccatatcccaaaaggccctacaataaacatctcattaaaatcttctggccaggcgcggtggctcacgcctgtaatcccagcactttgggaggccgaggtcaggagatcgagaccatyctggctaacgcggtgaaaccccgtctctactaaaaatacaaaaaaattagccagacgtggtggcgggcgcctgtagtcccagctgctggtaaggctgaggcaggagaatggcgtgaacctgggaggtggagcttgcagtgagccgagattgcaccactgcgctccagcctgggcgacagagcgagattccgtctcaaaaacaaaacaaaaccaacaacaaacaacaacaacaacaacaaacttcttagtacatgcttggcatgttcatcgtatgtatgattttccacattgcttcttctctgtagaatacctcttcccacatcctctccccacccttgtcaatatccttcaaagcccaattcagaggcaaactataacaacattttcactatccctcctctcctccaccccttccttgctccaccacaaaatatacaaaccatctcactggtgtttctgaatagctttgtttataattctcataatagctatgacattctactttgtattaaagttctttgtattaatgaatatcttctctgccaagtcattaacttaatgatgctagttactagtctttgtttcccagcaacagtagccaactcaggctaccgtaaacaaaaaaggaaaatttattatgaagacacaggggtgtctcaggaaacttcttggagaaattatgcacacaagtcaagaacagagatttagaaagaagtctttttttacctgattctgaatctcagctttaccttttgccaaacatgtaacattatatatgatcatattaaacattctatgcctcagtttcctcaattaaaaaatgaggatgataataatagtacccacttccaaaaacaaagctggtaagggaatgaagctggacctcaggaaggactgaaaatctgtcagaaattcaggccatgtttctctgattcacctatgcttcacttctcattttactagagattgaatttctctgctctccgttattcatggaaaaagttactggtccacagttcatttgctgtacatctcacctcttataaagayggattctgtctttgtctgttctaagtctgggtgagaagactgtgattgaccaaatttargtccaatcagctgcagccaagattaataaaagagtcattgagcagtttccagaaacccttctttatgagaggcacttcyaagaggagaaggtttaaggagaaaacaagataggtagtgatccactcaaatgttcctttatttttgtgtcctcaaacatgcagtgctgtgtcttcagtttttataatatataggcctatatgcaccttgatcttgatattacatacagtattgtgccatactcattatttgttcaattatgccttcaagaatatttgaataataacttattatgttctaggtattatgccatatgctgaaggtataatggaatgagataaagtgaaattccagacatcatgaagctaatatatactgcctgctgcttttgctattttcaaaaatctggtctgtacattctcacaagccatcactagcttattaatatttataacattgctcattctttgtcagaaccactgttttcaattcttttgtcttttaatacacttaaaaaaacttattaacatttagttgtattttcacaacattaggtatgtctcccactaacatctaccttggaactggaagttatttacctcctacctcctagtgaaattccaggaacagaaaggcctaagttctaagttctatatacatcactataactgcctataactgaccacctaagtgactttttttgtttttgtttttgtttttgtttttgtttttttggagatggaatctcactctgttgcccaggcaggagtgcaatggcgcgatctcagcatacaccaccgtgcccggctaatttttgtatttttagtggagacggggttttgccatgttggccaggctggtcttgaactcctgacctcaggtgatccacccgcctcagtctcccaaagtgctgggattacaggtgtgagccaccgctcccagccctatgtaacttttgataacctccaaaagttctttgttaagaactatggggcctaattcattttaaatcaatcaatcattaaacatataagggattttggctaaattatctagttgtaaaagtctgtgatttgcagattagtatgaaaaatacatggggacctccacctgaatagatattgtcagaacaatattgtttgtggtctctctcattctcttcctacttctcttccccataaccattagctccatccccttctctttgtgcacacactgaagactattgtgagagcagggcctggctgagtccaaaagaagcaagtgttagggagctagaaatgagatgaactctttgtatgactctcagccaatgaactcaattactgtgtttttgagattggttatttgttttctacaaaagcttcagggcccttgttcctttaacatatctctgttaagggatatatgtattgtctctccttacaccctaactcaaaggacagttttttctatttatttcctggctcacctccttgtttctgccctggtcccaaaacttatcctaatctataagattttttctttgttaattttctcctctattcatggcatcatcccttacttccatttaattagctctgtcttttatggttttctacttatatttctcacataacctagatatctctctgttcacatacccccctcaacttcttcctcaactctcttcttccttttatcacatgtcctctgtctgcctccacatcyttgttatatacttttaaaatccagcattttgctatgtgccaacctatgtgataagcacattccatgaaagatctcatagaatcctcaacaagcctgttaattggtactattatactcattttacagttgagggaacagaggttgaacaaacattatcaaaatcacacagttaaaatggcacaacaggttcaaatggaagtctgtcttctgaaactgacttcttaagcagtaggctgtatgctcttcgtttgttttgaaatcttctgccagctctatcctgtcctcccattctgctgaaatgatcaacttcaaaatttgtcaatggcataaatccagtggattttctcagctgtcattttccttaaccatctgttgcactcatcactgtggtatgtatttrgagaaacgttttctaccctggcttgtgacattgaacttcctcctgaactccttgtctctttcattaactcatcttctttctcccacctccaaaaagtgagtgttcaccaaaacccagsatttgaacctctgccatttttattctagccaagttccttcagggaactcagaaatggaataagtcaagatgagatcattttttccttatttttaattgctctaagagataactgactaactaaagtaaaaaaaaaatagtagcaatatattatcagtttatttatgtaaaagtaacagggaaacacgagcacaaaggctgcatggaaggaattgagaatatactgttagcagctccttccctgtgtgtgactggttatttgaagatagattatggttaattaaagatgtgtattgtaaatgagatgacaactactaaacaatttaaagaaatctaaatactaagtcaacagaagagatccaataaaatcgtaaaacgttcaattagcagaagagaaggcagaaaagaggaaaaaaattaaaagtgtggaacaaatagaaagcagccagcaaagtggcagattttaatctaaccttttatcaattggtatatccgttccaattggctatgctgatataaaaacacacttcgaaatgaataatgactccaacacatagatgtttgtttctcactgatttaacagcccaccacacatgttcctggtaaatgagtgtgttgtctcctccaagtggtcattgaggaactcaggctgcttccaccttgtggctcaccactccctaaggcctcaatgtcatctgcgtttggctattaaagaagaagaatgcttgtagtctctaagaagactggttttagaaatggcctgtttcactttgcttgcatgccattggctagactgtagtcacatatccatacctaagtacagggcagcttggtaatatcagctagctgagggtcctggaagaagaaacagatttttggtaataaactagctctatctgccacagataaacagttcagccacaaggttagaaattttcacaatgtttttatccataaaaaccatcttggagtttgaaacaataaatatactttacaagaaaaattcagtttcctttttaggtgctacctttttgcatttttaaataggacatcaggtgattccaaaacttagatgatatcattctgagaaatactgaacaaggcatgagggagccactgtgactgaagctggatatgttaacatctgagatgtttccaggaagatctgttgtctcttgccactcaagtgtgttctgggggccagtagtattggcataattcaggattgtaaataatgcagcatcccaggtaccacctcagacctattaagtgaaaccatatgttcattacagtttcaggagcactggtctaattattttatgccaagatgttagagaatgtggatggctgtagaagtaaagtgataggagcattatccaatcaacaacaggcaaaagcagatgattctgagaagaatcatctacagaatttgaatggaattcaagccatgtgagcctgagatagaccagaatacttytgggggtatgatactggcaaaagaaggaaatgactatgaaaaaaagtagatagacctttattaataaagttcatttgtcctaaatatatgagtggtatatatttattatagaggattggaaaaaaatctagaagcacaaataaatggaactatagttagtatccttttcttttatcttccattttctcctattcattttttcatattatrtatttttgtatatatagtactgtttatatatttatatatttatatttttgtatatataatattgtattatacagaaatattttactatttcatgatagccaatcttatgtaatttatcaactctgtctctatttttcaacatttaacctatgaacttattttcactgttaatattgagtaacattacaaaaaatattcatccttgaacatcaatctatctgaatatttctggctgtcttcttgggctagcttcctagaaatacaatcactaggacaacaaatatttactttctgaagttgtttgctaatgttgctaacttgtgtggaaacttttcagaaagtctcataagaaaaggaagccttttgatttgtcgatgttcttcttctaattcacaccctgcctcctggagttgttatatggattcaatgaatcaatgcatgtaaagtgtttagtaatatgtccggcatatmgtcagtattttgttaactattaatattgtgcagtagcacacagttgttaaacctggatttgcattcttaccttgcctcatactaaccatatgaagcaggacatatcacttgcccttcatgaacctcagtttactcatgagtaaaatgggcatgtgttactaaccacttcaggttgactttgtggagctttatcatatgtgaagcacatggtacaatccttgtgaaaaagtaagcaattcagcaaatgtttgctaatagtatttattatttttagtcttaaagaaattgaaaattttcttgctttttttttccttacttccttcagtgtacacactcccatttctatctcaatttgaatatgtccagtgaaggtagaaatataatctatctccttttgaaggcaaggaggagtgaagcatttaggaatactagttttaaagatgagaagtctaattattttgattaataatcacattagcttagtcattcctcaacatagctctctctctttgcatctatatataatcctattatttacttaccaatttttatatatactcctgtttactaaaacattgacattattcatgtaggctaactgttcattatctatggcttacctatcacgtatattatgttcacaatacacatcaatggcaagtagggttctctctcaggtggtacagtagctcatatagtatctatttagagtcttggttgagaagcaaacatctgggcttattggaaataagcgtggccactgaactaygagtaatacttcatgtatgggtaatttcagtcctttggtagagtgaatagtagctatgagaaacaagttgagaataaaaatattggaaaataagcatattttgatattttattctatatgaatattcatgttaaaatgaataattttcactttcagaaattttattttaaattaaatctaacattactatagattattaaataaaatactgatcttaggggataaaaaatgtagatgacttcaaaaataataatccagatctaattgttttttgggactttagtaacctcaataactaaaattttaggtttcataaaatattttgaaaacatgaatatatagattagaaattttgcaagatgattttttactccctttattgttgtatgtattcattttatttgggttataagaccatacagcaacaagaaaaagttgtgatggtacttttagttagcatatcagcaacatcagaccattagaacatcatacagaatcaatactccccagagctcacctaagattagaatacagacatgatatgtttatgacatatctacaggcaatttgctctcctccagaaaaagttgccactaacattttattcatttctctctggccttaggtccaagcacatatgcagagagctcaagtagacggagcacacataactgaattcaccaggtttatggtatcctgggccattgagttaatagctttaattgtgaacttagagaaaatgagaagccaaggacatctcagtccttagagttataattatataaatgtatttatatatgttatataaaaatatatttatatattatgtatgttataaatatttaaataaatatgttataaatatacatgttatatatgttatatatgaatatataaatatgtatataatttagaaaacattggttccctgagcactaataacagttgcttctcattagatagtcataagctacttctcaataacagccaaaatatatagtcactttagtttataatgctaaattctgtgagctacaggacttttatttattccaagtccctggcacaaagagtgtgcttaataaacacttttaagtcaaaggaaaaatacaaatatgctgaatatattgaaccacattttcatgtgttctacacctttagtaagagtgtccttattttaaatgcagaaaacccgtttgtttgataaatataaaactatttactatttacagttttgagggactgcaacacagtgagtggggttgtaaatgtttgactttaacctggtggattttggtgctatattgccaccttgtggttactcatctaaaaatggacttttcttcaaaaacaaaaatcaaaaatagacaaaacaaagaataactgttttgcttttgtgatatatggtgcaaacataagtttgtgctgtgtgcttacacacacacacagacatacagtcacacacacacacatgcatgcacaccagaaacctgagtctgaaagtagtgactgtgcttgaaaaggagagaaatggaacatctttccaagagtaatcctttaatgccgaaagtctctcatataggaaaattagctaagtggcctgtctattattttcaaacacacaatgatatgatttcaatggttaagtaaaaatgtctttccactctttataataaagaactaataataaaaagaaataatgtttttcttcctagtttttttcagagcttgtttacatcatattaaaattatttctgatgaaataaggtagtagatgtgaagaaaacatacatagtgaaataaaattttcttagaagattatgactagaaatttccaaagcagctcgtttagaaaaacgagcatataatttagtataaggataacagtatcattgagaaaatttttatttctgagaagaaaattacacacttaataaagtagagaatttaggggaaattgtattaaaatatttttaaagtactgtgatttttttaaaaagagagactttaaagggaattgatgccttaatattctcctttataggtcatatatccttgaataaactctttaaaattgcttaaactttaaatccacatattgcatttagaactgagtcaattaatttgtgaatagagcttactgaaagagaatctgtgtctagagctaatctggtactagaaaatcagaaagaccattttacaagtcctcttttactcagattatgtctgccttcgccagagtatgtttgcagattagtcctgtagtcttagatcctagaaagatccattattgcaaaatatgaataaattcagtcttggatttatttacattcattttcacttatttacagtcattttactacaggttaaaatttccaaaaacttttatattttactttttctacttaggtaggtaattaacattcattgtggaggcattggaaaacagaattaaagtaaaataatttatctgtaatcatagcacccatgatcattaccattagcactttatatatctcccaaatcctttttgcttttagaaaattgtgtcatgactctatgtactgttataacatcttctaacctgtttttcccttaatcatgcagttaaatagcatcatcattttgttttctagctacaccataaagctattctccattgtgagacatttggatggttctcaaattttcattcttaaaaaacatactgtgatgagtctttatatagatatatgtgtgtgtgttatatatcctatacaaaaccaagatacaatatacgtcacccatatgtatttatttttatctagttattttctaggatttgttaaatatttctagaaaggactctttgataaggaactgttgggacaaagaatattgacgagtgaagacttattactaaataattgctcacccaaagaattccaattaactgtatattcctactcatttaggtttgactgtttaccttcagttccaataacactccctttgtcattgatatttattgaactataatgtatatatggaaatgtgtacaaattataagctcaatgaattttcacaaactgatactatcaatgtaatcaactcagttcaagaaatttattaccagcaccctcgaagctctccttgtgtctatttatattcacacttcaaagataattattaacctctcactgctttgattagtgtggtctattttaggactttatctaaatgaaatgacgtatgtcttcttttgagcctgacttttttcaagcaaccttgtgtttgtgaaattagtccatgttgttgaagttgtagagtgttttatatatttgagctctatattatactatttcaatgccagtattcttttttaattgttgtcagtctgaaagtataaaatacagtgttacagttttcacgcacaatctttgatttaatgtgaggttgaacttttttttttttggcttcactggttatttatatttgctctagtgtgacattggtcatttattgttcctctgtggtaatactggtttctctattgtaaataaatctttcactcttgcccaagcaataggttacattggcctttagttacaaaatagaagaatgactgttgtttcctcactctttcccaaaaggccaattaagactaaaaactgttgttttgacaaggtaacaagtttcccttctgggactcctgtagttgcagggtcttgatcctcagtagcgagaaaaggaacatgatacgtggattccagatcccagaagtgaatcatccacatttcgggctgaagccatttctcatctatccggctgattcctctgacttttgctactttatacttttttgggtattttttcaaaacctgcttttcttgaaatgctgaccagtcctggttaactgtttgctgccccagggtacaaagtttctctaaagttaaagctgacccataccccggattgataaagggtgagatagataagaaactctactttagggatttgagaatcactggataagaggagattctaggacagagatgattctggtttgattaatttagggagaagcttagacattagtcatttgaaaagggctccaggtgattccaatgggttgacaggattgagaataatggaaatttctgactcctaaactgatacattcagatccactgaatagatcagttttaacctataagtaaagaaatgcccctgcctgtttatatcatggcagactcccagagacgggtcaacatcttaatatttgtcttttccaagtactgaacaatgccacaaatttcacttctaaagtataattccccattcttactgctttgattcatagtaaatgaaaattgtcctaaaggtaccagtattttactgctgaatatgactaagcttgtcagatcattatgtgagaaatgttgtggtaatggaaagaaagcaatagagaccttctcatgttggagagtataagaagaagaaatggaggtagagaaacagtctatcctttgtaaactttccttaggtcccaaagaattctaaggctttttaaggactgtagttcttcctttgtgagattttgtaagtatccttttcagtcttgcaaaggaaactctaggcaagtggttgaaaacccacagtccctttggcatgcctaaaggacacaggagccaagtgagagagctcccaatggccaaatgttgaacagtttgagcaacaaaagacataaattggtattacgttataacccaaagtgcaaaataattacctataattagctatgagtcctccctaatataaatacatgttagaataagtaaataaatgagaatggacaaattttccatacagaagaattcaaaatttttgtgtagatactccccattctttaagtgtgagctacgcatagtgacatttttccaaaacgtacaatacagaaagactgtggggagactttatagtgcagatacctggcagacaccacctcagccagacaagaaaagttaataccagccgtcataatttatattgatattatatatccttgatataatgctttcaggatgacactttacctctgtggtcttctcccaaaactctataactccagtcttaacaggagaaaaacttagacaaacccaagttgaaggacaatgtacaaaatacatgacgagcactttgggaggctgaggaggggggatcacttgaggttaggagtttgaggccagcctggccaacatagtgaaaccctgtctctactaaaaacacaaaaattagccaggtgtgattgtgcgcacctataatcccagctactcaggaggctgaggcaagagaatcgcttgaacccaggaagcagaggttgcagtgggccgagataacaccactgcactccagcctggctaaccgagcaagactccatctcaaaaaaacaaaataaaacaaaacaaaaacatgacttatactactcaaaatagttcggagaaactgtcacagcccataggaggctaaggatacctgactactaatgtggtatactggtgagctcccagaacagataaaagacaccagtttaaaaatgtctttagaaatgtcattttaaaagtctaaagaaatctaaatattgcatggattttaataaaaacttgccaacatgtgttctttagttatgacaaatataccataataagatctgacaaagaagccaaacttcagtcagatttctaaaacttctcctaagcccacctcttcatttccttgtaaaatccagttttagcaattcctactaaattagcttaacaagaacccctatagtcaatatccaaatgcccgatctgattaggtctctcctcctctaccaacccgaaggtcatgtctgatcaccctatcctgtcttctgcaaaaatcctggtaggtcagtttagccagaattcctttcactcctgatgttttctcctagtaatttttaatccactgacccccaccccactccttggctrtaaattctcacttgcccatgctgtatttggatttcagcacagtctctctctcctgcattgcatgtggtccctgtacctactgcaatgttcctaaataaattcatccttgctgtgctttaataagtatcattgaataatgttttctgtaacagatgttaaccatagagaaaactgagtgtgcaatatataggaattctgttttatcttcacaaattttgtgaaaatcaaaaactattttaaaattaaaagtttatcaaaaaagtaaagaagggaaggaaggcaggaaggaagggagaaagagattcccacatgagcagcagctgtcagaatcttgtcaaaatttaaaattctcaagtcgcagcccagaccttctgagtcaaaaactcagggaatgtagcagtaacctgtgattgagaaacatgatatagttggttggaaagagctctgcttccaggtgcttctcattttaaatgtgatcatgttactttttctttaatgcccaagagtgaagaatcggattaggctttactgtatcttctgattaccgaattgttacctttcacagaggaatggcatgcctgcctctgttcttctcatattattaacatttgaactccggggcccttctcagaccctgttgtrctcatgtcttccataacttctccggtacacagagagctcttccacctctgatatccccaagtgcataatcatgtaccaaatctcatgtttccagaggctataaatcaaagcagagtgtagattccctggagacagaagatttcacctaccagatagtgaccttgggtaaattgtttattccctctgtacctgagttttctttctgagaactggggatgatacaagagtatctacttcatggattttggggagaattgtgaattaatacacataatttgttaataacagcatccagcacttagtgaggaaccaataatgtaagctggcgttactgctggtggcaagtgttttgtctcttaaatatttcttccttctcccaaagtagtggagttttgtgtgcaaaacaatgaatgtctcaataaagatttggtgagttgaatgggtaaagtgagcccacaaaaccctatttcaaacccagtgacttctctctcccctgccctcacataccagtcatctaaggcattttgatgttgaagtagaatgttgaaaatatttcatgttgcttataaaatgcttttagaataaagttagagaattggataatatgtgaaaatctggagtaaattaaccttactctaagcttcaccacctacagttgagctgttaccaaygaacaacaccattttacttttgatcaaagattattctagctccagagagccttagcagaatttctgttagcctcaaagacgagattagacataaaagaaataagcaccctggggaccattctagaggccactgggtaagtgaatatatttgaataaccagttcagattttgcttatttgcagtttaccataggttaaatagaaatgcaacaatttacatgccataaacacacaagctttaggtggtttggtttgttttccagatgggaattaatgtggtggactccgcagtatccggattaggtggctgcccttatgcaaaaggtgcttctgggaatgtagccactgaggatttgatatatatgcttaatggcctggggctcaatacagtaagttactttaacgtattttaatattcatgcattccttgcagctccaaattgcaaagcttctaagatgtgggaagcaattttgaggtcaaagttttactacacttttgctatttgctaaaatgcacagtgggaaaatgcaataaaaattcttttggggtctttataaagtaactcattgctatagctcaatcaccaataatgctaccatttcacatttttatagtgcttcatgacctctaaagaactttttcatgtattatctgatttgattttatacactttgtgagttggagcctgtgtctttgctgttacgattgttgagttttgcagttttgttttttgtatggatgtttttcttggagaaaatggagatcttgattgtctcagtgacaactgtagcttctggaagaactcccagggcactttttaaatgatcagtgaaagaggggagcttcataacacttagcatatgagacactggatggcaagaatagtctctttgcaagttgtaccggaaaagtcacgtgctatgtaaccacatccaccaaattcagcaccttgttttgccctatgattgttaacacaacctgttagtctatagaaccgatttatttaggaaaaaaataaaaatcacagatgattagacatttagaatttctgagatgtaaaataatcatctgtattgtaaaatgaatttttttactctctgctgctcctattcctcctttttcctcattctacttacattaatgctccggctgcattaaacttgcttctagtttacagttctgtaccattttattcctcacttctactccttgctcaggttttcactaccatgtgaaatggccttatgcctcgtattccatttggcctggaaagtaagacaccaccatcctaaaaataagccgtctggcatctccctgcctatcccccaggtcaaactgttaggtcccattccttagtgttttcatgttttcctctgaacttaccacaaggttatataattatcttgtttatgtgtctatcttcccatgcaaccacagagcaattatgacagcttattcatactttatacttggtgcctgtggcataaagatgctccataaatatttattgaaagactgatttcacttggcactaaacaccaacagctgttgcccataaacaccaaaagctattgcctattttctctggttagaaataaatgttatttcatttacatcgtatcttaatcatttatatcagaagctaatgacataaatgagggtaaatagctcctttcttagaaatttagatgactgaatcgaactccatagctgatagctgatgcttaatatatgccagttatgttccataactctggagtccaaatgcaaataaatcaagtttattcctaaaaatttcaacatccaagggttgctacattgagtagctgccacaattcaactagtcacccaaggcaacaaaccaggattctctatagaatttaatctcactatggattccatgtccaatcagttaccaagagctgctaatctgactttaaaatattttggttgtccttcccttactacctctgctatgactacattgatgcaggtctgcatctctttcctgggtgttcatcctatatactggtcgctggctccagacttgcctttaaaatctatcttccatgctaccatcaaagggttacacctaacatataagtatgaataggctctaygtctgcttgagcamggatcagtggattctaatttcctgaaaggaagcctgtgctctatcacataatctggcctattattaccttttccagggttaatggtatattttgcctttatccatataygccatggatatttaagatatcttggactgctcttctctctgcctgcatacagtgccccatatatcctccatcctcttttatacattttgtataaacctcaggtcaggctttacccttcttggcacttttccctgacacattcctttctgcatttttttttcctcagtgggttgatggcctcatatctctgcctccgtaataacctgggcatatctctatttgtggctttaactatggtacagaattttctgttgtgagtccacattgcttgcttgaacttgaaggcagaaaccacattctacgtgaggttcttgaaactccagaatctatcatagtatacgagacatatttaagcacccgacaaatgatttaagaatacatgcagtgttgtttcataatgatatctactgrttaaataaaatggtrgagaaaagccaaaacaaaattcttctttggtgcgatatcaacaaattctactgtataattgtgacaaatggacttactgaaaagagaagaaagacattaatgacaaaaatctttctgtcaacccttgctggatgtaatttataagtgaaagkcacctgaagttaattgtttacagaatttaagtatcattggattaaggatgttaaacagatactccacgtaaagccrttaccacgacaaaaccaactttctcaaaccaaagcaaatgttagtatcctgaaaacaactttgtaataaaaagacatcatgaaaataatttacaagtatcactttacaaaatatttttaattcttaaagagataagtaattagctatatcgaaatgtctccaatttctaaaatgatattcattgttatgaaaagcccctatgagtttttatacttgtctattttatgaaagtgacaagttttcatagatattaaaaagtactttataatagcaaggaaaactgaatattttcaattttaagcccacattgtttctagtccatattgagggggaacatagaagcttatgaaatgccacataarggcaagtttgtgcttaatccacttaatgctttgcctcctccggtgacaacaaaagtgctgggtggaaactttgatagtgaccctttccttacactaaagccaagagcatgtcctgaacttgccctttatacccagctgcatatctgtcatccatggatttacctgagcttttgttgatcctatttatactttcagacagtacaacctctcargcgaacaagttccagatgtgtactaaataccacttcattttatttcacttgcaactacctccttcaatatcatactagtaatagtatttctggccttggtttaaaaaatatatatgtatatatatgcatacaccttttctgtaatccttatggctttttcaagtttgtttctttatatagyaaagaggatagttttttttctaagtcagttcttatctataaactgctccaaaacattattttgattgtccttcgctgatgctttgttgactgcttttctagttccattattgtccttcctagactctagataccagcctgaattatgatgtttttcaagtgtgtctacctatattattatacaagggtcagattaaagatatgctgtaataaagcagacaaatctaaaatgttaacaacattattcatggaaacaaatgttgccccaaaattgataatgacmaacaccactttgtttagtaattttaaatggttaagtaactactaataaaatttaaaaggctatgttttatcttttttctctctaatccctctgccttcctgatattccttcatttcgtcaccagggtgtgaatctatacaaagtgatggaagctggtgactttatttgcaaagctgtgaataaaaccacaaactctaaagtagcacaagcctccttcaatgcttgacttgaatggatttatgacgtaccgttgagaagatcaatttcagctacaatactcatctgaaaatcattaatgccaacttgctctgatatgtgaagtaatggacaagagtgggaaaaaagagatccttttcaaaaagattataactggatagattaagtcaacaaaatgcaatatcagtcatcaggtaaattgcaagctgaggataaataataaaacttgtcataattttgaacttggaaaaaagtttcttttgctctcatagaaataactttttaatttagtagatgggaaaattgacttcgtatttccccaagtatcaaatactgtgttaatacttaatcaagcaggcttaacactgtgtacatattgtcagtagtttatgagctcctgcatagtatgcagagtgtgtggcctcaatattatacattatgcctctggatctcaactactcatttgccaagtcagttatgttatggaccaaaagccaaatctccatctgaccctacataattttagcaatagaacttttatatttcaagtatggytaacatctgttaactatttcagtgactttatctggttccaagaggctgtggccaatggcaagatgccatatcctggaaacatattacgacctcccatgtttgttacatgcatccagtttaccacactttacctgtcatcagttatagtaaaaaccagcatggtgttactcaactattgagaaattgtaagctattttttttgtcctgatgtctaaattgcagtgataagaataggttgatacatgtatcataatctacctttataattttcagatcactttcaaattgcccaaggaaatattgtgatcctaagaatattaagataattttaggttaatgaaatacccattttccttttattcatggtgctttgcttacccacattattttttggtgtattttttagtggttattttagaagttgaagtggctgaaattttgtctattgtcttagaattgattgccagaaattgcaagatgtaatatatcaaagtcagggatgaggagcaggaggactattcaagataaacttctgtaacctatgcatattttatgggggcagtattattacaaatggatctgaaatgtcagttctagtatttagagagacttctctaataataccgggtgatattatctttgagtaaatttgaatataaattgaaacataaaaatgagtattgtgaactttctmggaaatattcattaaaaccattgaaataaaaataaattcaagaaagtaagaagtactgattatgttgcatggttctggagcaggaatactgagagcaattctctgttttgggcttaatgtttgtgggttgggggaaatgcagggagcagacaaaaatcaaagctggttatgaatctttttcagttacatctccctgtgcatctctcttcacgaagcacatgaccctgcacactggcagtaatgggacacctgcaattagcgtgtacaactggatacgtaccccatattctgaggagactgacttcctatctcttacaatgctatgctgttcctaatttcagatatttggaaaagcatctcttgttacaaactgcccatagtaacaactaaggggatgatgggaaagcattgctgttttgaaatgaaaaccatggactttgaaagacagagcaagtagtcagaaactccaagtacagtctacagcacagttacatagcatccatatcagtgtactgagtcacttccatgaataccttgatgctactgaatcacatttagtatgagaaagcttgttgtaggtatttggtatcctttctccacacaaaccatctaaatccctttgatagtttaagagagtttcttttctggttttattttctccaccttatttatcttttggcctcttccttcttatgtttgactgcagactcacaaatgcacagttgccttcattcttgcaactcaacatgtggtccaagaccagcaggataatcccctgggaccttttgagaaatagaatctgagccttcactccatacccattgcatcacagtttgcattttaaacaagatccttacgtgactcatatgcarattaactttgagaggcacttgcctatttgatacctcctcttgggtatccaacaggcatctcgagcttcatatatattcaaaattcttgtaccatttttcactttgtgcactgtagtctaccccactgtcttctctgtttttggaacaaggcacactcagatccatctcaggtcctttaccttagtttttttctgtgtctgtttccctggctctttccctgggcatgtttggctccctcttgtcattgaggtctcagcataaattttacctccttaatgaatcttcctggacaactcagtttaaagtaagtcctgttacattctctcacatcaactcatttaattattaattatagaatttttaccttcttgtttgtttattctttctttttccaacagaatatatacacctgagagcaaggggtttgctatcttcttcactcttagttccgcagtgcccagaacatagtgctagggtctagcactaaataccaataaatgttagagtgaagaatagaaacgggtttaattcagacatttgggaattgaaggaaggaaactattctgcatgaactctgttttctgaatatatacatatatatttcctgagcccttaatagatttttaaggtttatttgttccagtttatatgttgaatgattgaattaaggaatgaatgcctgtatacaccaaagaggttgttaagaaatgttggataaaccaaaattgtaagggaaatacatatctttttaagcagaataaagtaaaagtgaaactgctggaattgataacaacaaatggacaatatcaataacaacaaaaaccttcctgaggtaaagaggcaacagctataatagcatctaatcagctttgctatgggcatgccattgctttctgtgtgtcttacacacatgcacacgggcacgcacacatgcatacataatacaccattccagaaatggccagaaaaatttagttttctcaaacttctgtaacctgtctcttctctatcaaagaaacaagaactgcattgcctatttaaaagtccactgtacatgtcatcgaagaaaagcgagcctgttatatcagctgttatctatattactaagagataaaaatttcataatgacttgatatcaagaccttattacttcagtattccttaaattcctttagtaacttatagatatttcagagtcaagtcttagcagagacatactcttaattttctgtcactgacacataagcaaacttattctctgtgatctcaattcatgttgtacattagattaatcagtggatgacgggagaggagtttagcaatattgatgcctgaacttcaccctcggatattttgatttaattcgtctggagtagtacttcaagcatcaacattttaaaaaaaaatgtatataaggcaattctcgtgtgcaagtttagttgaaaatctccaatttagagcaatggttttgaaagtgtaatcccaggagcagcagcagcagcaaaatggcctgcttttcttaggagcttcatccagagaaaactgcatcatctcagagtcagttataaaatccagattgtgaatctgtgtatactacagagataaaggacagtaagaggacaccaactgtattagctcatccttgccttgctatacctaagactaggtaatttataagaaaagaggttgaacctcatggttctgcaggctgtacaggaagcatagcaccaacatctgcttctgggagggcctcaggaggtttttactcatggtggaaggtgaagcaagagccagcactttacatggcaaaaacaggagcaagagagagaatagggaggaggtaccacactttacaacaactatcaccaggacagcaccaagaggatgttaaaccatccattagaaatccacccgcgtgatccaatcacctttcaccagggctcacctccgacactgagggttacagttcaacatgagatttagagggaatacataagcaaactacataaccaactcattagaattcaaattaggattcactagagatgcaaattctcaaactccaacgtagatgtactaaatcagaagctctgggttaaggcccagtaatctgtgtttttacagatcctccaggggattctgaggaaccctaaagtttgagaatcactgaccttctaaggcagtgattttaccacacttgtaattggtagaagagaaaaatggatacgatttagcttattgtatgccctatatccacacaacaaagcatcattttgaactagcactcatgtaatccaaataggcatgcatttccagcctacatttccaatgtgaacagtgctttcaagagaggaatgaagtataaaaacagatgtcaatgtcctctgccacattctttcccttgactgtgtttcccagcttcgtaagttgtaagaggcatatgaatagactcatcattaggattttctccaggaggcttgagtctgagaaaaattccaccagggttctatcgattcttctttggcatcaactgatcttaggctctggaagcacacaatcgagttttgagtcttggctctattactcaatggctatgcaaactcgttcaatttacctaaggtctttaaacctaatttcaaacctcacttccttcacctgtaaaactcagatgataataacctttatttatacagctattggaaggatttcatgaaataatgcttataagtgtttggcaaagcgcctggtacttagaaagtaatcaataaatgttaacaatcataatttttattatcctttcctatggcactgccatggagtggaacttcccctccactgagagttaacaattagagaggctctctttctatatcctgttccatgtaaagtgtgtgttgtcttaaagggcctgcaataatccccaaaaaggccgttcgtcatcaaactccaggaccacatagtcttaaattggcaccagagtcccatgctttccttattatgctatacccctgaggtatgtgtgctgagctaattcttttctgcatttcatatgacagtagtttgctacaggaacttgttttgagacttttgctgagtacacttatctaagaaatatcacatcatctaaagtcaaaaatttcatgaacattaggaaattgtgtcagtcttttggcagttggacaggtgagcagatagattttgatatctatttttatatgagttgtatttatttggtggactacctagaaagcttctgctttcttcttattcttcctggttccattataaagtagaaccgtgtgcttagttgaagtattattttcttccatgagggttgtctttcctttgacttgagccatagtatgaaacttaaaagggattatgctcctctaggaattaataggaaataaatcaaaacttctgatgatcatcccatctaaactttccttctccagatggttatttaagcctcctgtcattagtaaagcagagcaaaatatcataggtagccagccagatcattatcctgaattatatgaatcctgaaaaggtggcttcagtcagaaggttttcacagtgacctctcactatctgtacactaataccagtatattggattgttgggcagacattccagcagcattcagaggggtccacagaattacaaggaatcactgactgcttttcgtagtagcttcgtttagataaaaccgaattatctggtagtcagctcacaaaatttgtactgtaaatgtgtgtatactccagaggtgaagggaagctgtagagtgccaatgtctgtctccttataacagcttgtatgctcagtacctatcacattagtataaaggaaaacatatctatggaccttcctttaatcaaagaacagtatgtctttgtttttctcaactgtaaacatctgcaaagaatttgaagaccaaagtagttcaggctagaattatgggcatgaggaagaagtgagaaacatgtgataacaaatgctaagagcgtaagtggggataggtatgtttctgtaaggggtttatgtccatctagacattaaaagcctcttagtattcttctacctcatggacattttctttttttacttttttttttcttttttttttttttttttgatacagagtctcactctgtcacccaggctggagtgaagcggcaagatctcagctcactgcaacctccgcctcctgggttcaagcgattctcatgcctcagccaccagagtagctgggattacaggcatgcaccaccacacttgaataatttttgtatttttagtagagacgggattttgccatgttgaccaggctggtcttgaactcctgacctcaagtgatcctcctgcctcagcctcccaaagtgctgtgattacatgcatgagccatgtcacccggctggaaattttcttttaccactaactgattagaggctcttccctgaaccttctgcatttctataacagtacaccatttttattgggtatttaatgtttgcagtcatggttgtccttcaaagttgtcattttgggaagctatgcattcatgttaatgacattatctttcagaattggaattacattgagtctcttccataaaagaaactaaatgtcactactatagagtcatttttttatattgttctaatattgttaacaaagacagtattaaccatatttttcctgttaatttagttaacatgtatttatcaatttatttgtctactttattcacaccagatttttgtccaaatgacattcagttatttctaaaaatcaaatccaggctgaaaaagaaaaaacaaatttctacttcacaggtaattcaaaagaatatgtcaaatgtttctgagacaatttcagtgagcagtaaataaacacatttgctttactggcagaatatttgaatagttgtctagagttgcaaggcaataattttggaaaggtatcattcacttctgtattagtttaaaaatcatattttacttttaaatttcttataacccatatataataccatgttctttatctaaataaagatgaactattaaatatatgtgattcccagataagtgaagtttccactttatatcccaactatttaaagaataaacatttctgtaggaagtat

SEQ ID NO: 94484 - DNA, 49150 bp, Homo sapiens
ttctcagcaggccaggttcaggtttcaaaagctgcaatttctgtgtattctcttttcccgtcaggttactttagagcagtgtttttcaaattgtcttcaactaaatccagagaaagaaggatattttacctcataacccagtgtagccaagtggatgtgtgactgaataaaaaaaaagatatttaattgaaatagtttatgaaataatttaaaatagaattagaaatagctattattatgtgcaatgcactctgatttttaaaatcctagtctattctatttgacttcagtataaaaagtgttaatcctgacccactatattgactttaggattcattaataagttgttacctgcagtttgaaaaatacttcttatgaggcaatttaaatatgcatttatagtttgaaattgcattatttagctgagaaaatatttgcaagttttctgactccttctcttttcttttcttccatagatatgtgcattactgaagtgtcaaaccactgacctggaaacgtgtggagaacctgtggggtcagcttttaccaagtttgaagacttctccctcagtggcacatttggaacgcgttatgttttcccacagatcattctaagtgggagtcagcttgcccctgaaagacattatgaggtaggaggtgtgcaggatgataaattcctttgagcagagtagatgggtagagcagcataatgaaaatctttgaaataatgagagtatagcaatatcgtggttcacattctacaagaaacaccttaaatatgtggaaactatgatatggaatataaattgtggttttagattgccattaggctgtgatggagaatttggggttcatttttttaacataaatgtgatgttgatattcaaggcaacaggaaattcacagagaagctaaaataaaaatgttgactgctgataatggcaataatgttgtcatttgcatggtgtagaaggtgcaaattaaatacattaaataatgcatctacaacttattttctgggtatactattttgagaagttgttataattatagtaataactaatattttgtatagtgtttcatgagtttgaagaacatatttttatacatattatttgaccacctgtgcaacaaatttgttggctgcactttcgcacaaagtccctctactttcagacttgaaacatgaacctgggtcttccaacaccaaatcctgtgtgatttttaccattctacactgctttaggagggagtgatcttgcctgagaagggctctaggttgtaacctaaactctgcactgaagttaaccctttgctttctttgaccagatttcaagagatggacgcttgaggagccgaagtggagcccctttgcctgtcttagttatggccctgtatggaagagtgtttgagaaggaccctccacgcttagggcagggatctgggaaattccagtgatctcctttagcagagcccttttaggattagcctggctaagaaaggaagaaaaaaaagagatccgttagtgtctgtttagaaaagatgttataaacttacagaaacaaatataataaactgaagcagatttgaaaagcaacaagtgtgtgtgcaaatttcacattttacatgtttggtatagcacaggttcatttatgggagccgcattcatcctccatgtatgtgagtttaagtatatgtaagtatgtatatgtatagtggagcgtatatttaaataggaggaggtcctagaaaaatccttttgcagtaactgcactaatgtatgcaagtgttgtttccatcatatgatggttaattttatgtgttgatttgactgggtcatgagatgcccagatagctggttaaccattgtttctgggtgtgtctgtgagggtgtttcaaggaagagaacagcatttgaattggtggactgagtaaagcagacggtcctccccagtgtggatggtcatcgtccagtcccttgagggcctgcagagaaaaacaagaaggaggaggtttgaattcattttctgccagactacttgagctggatagagatcttctcctgccttcatgtgctcctggttctcaggccttcaggcctggactggaattgacaccatcaactcttcagctctcaggccttcgaatgacacccctggctttcctgcatctccagcttgcaaatggcagaccagactgtgggatttctcagccttcataactgtctgagccaataccttatcataaatctctttctctctctctctcctgttggttctgtttctctggagaaccctgactaatgcacttcatttgtaaatacataggatgaactttgaatatgcagagggtatttgattccagccaattaagatacaggaaattaaagaataaggacatcttttaaagtaactatgaacaactttttagctagtattgtccctttagtcatgactaatttgactcctaagttctatttatatggaaattggatacttgaaatggatttttttttttttaatttttttgagaccgagtctcactctgtcccccaggctggagtgcatgcagtggcacaacctcggctcactgcagcctccgcctccctgtgtagggaaaagaaagagagatcagactgttactgtgtctgtgtagaaaaggaagacataagaaactccattttgaactgtatcctgaacaattgttttgccttgagatgctgttaatctgtaactttagccccaaccttgttctcacagaaacatgtgttgtatggaatcaaggtttaaaggatctagggctatccggggtgtgccttgttaacaatatgtttacaggcagtacgctaggtaaaagtcaccgccattctccattctcgattaaccaggggcacaatgcactgcgaaaagctgcagggacctctgcccaggaaagccgggtattgtccaaggtttctccccactgagagagcttgagatatggcctcttgggatgggaaagacctgaccgtcccccagcccgacacccgtgaagggtctgtgctgaggaagattagtaaaagaggaagacctcttgcagttgagataagaggaaggcctctgtctcctgcatgcccctgggaatggaatgtctcggtataaaacccgattgtacatttgttctattctgagataggagaaaaccgccctgtggctggaggcgagacatgttggcaacaatgctgctctgttactctttattacactctggcctacatgcacatccaggcatagtaccttcccttgaacttatttgtgacacggattcctttgctcacatgttttcttgctgaccttctccccactatcaccctgttctcctgccgcattccccttgctgagataatgaaaatagtaatcaataaatactgagggaactcagagaccggtacccatgcgggtcctctgtatgctgagcgccggtcccctgggcccactattctttctctatactttgtctctgtgtcttatttcttttctcagtctcttatcccatctgacgagaaatacccataggcatggaggggctggtccccttcatccctggttcaagtgattctcctgcctcatcctcccaagtagctgggacttcaggcacacgccaccacatctggctaattttttatatttttggtagagatggggtttcatcatgttggccaggccaggctggtcttgaactcctgacctcaagtgatttgctatccttggcctcccaaagtgctgagattacaggtgtgagccacagggccagccaaaacagaaattttttgaaaaataaattaggtcagctgggtgcggtggctcacacctgtaattccagcactttgggaagctgaggtggacagatcacctgaggtcaggagtttgagaccagcctggccaacactgtgaaaccccatctctactaaaaatacaaaaattagttgggggtggtggtgcgtgcctgtaatcccagctactcgggaggctgagacaggagaatcacttgaatccaggaggcggaggttgcagtgagctgagaccgcatcattgcactccagcctggggcaagaaaagcaaaactccgtctcaaaaaataaataaataaataaataaataaataaataaataaaataaattatgtcgttcagatcacatctcatttccttctgaaattattctgttctgaaatctacccaatcttggttgagcccttctcagtggtcaggggtttattgcaggctgtgccaggctgggagcttcctagacaggaccaccatgtcaccttttccccagatacctctggcccactgtcttggctctcttagtcatttttctggttggtcactgattaactctggaaagagatatgctgaagagcagctgggttctctgggttatgtaggagacacctctttgtccacagaatgtttgacaaacgcatttctgaacttttcctaggtgtttatttccacctgctataattcagtccagtaccagtaagtcagagatattctgggtggcagaaaatgcactcggtttccccctcccatttttcctggattctctcttcagggactatcactctcggatcttaggtttgtgcccccgattcctctgtgtgcagtaggtgggcatcttccctctttatcgccttacatttgttccttctagaattctttcttctctttcctaagccagttgtctgtaggctgcattatgtactctggttgccccagcttccttggcacctctcacctcatggcatttttatgtaagctgactcctgcccccctctttattaaaaggaactttaaaatcaaatctcggggcaggctaccataactcacacctgtaatctcagcactttggaaggacaaagcaggcagatggcttgagccaaggagtttgagaccagcctggacaatatggcaaaaccctgtctctacaaacaataacaacaacagcaaattagccgagtatgctagtgtgatcccagctactggagaggctggggtgggaggatcacttgagctcaggagttggaggattacttgagcccaggagatagaggctgcagtgagccaagattgtaccactgccctccagcctgggcaatagagtgagaccttgtctaaaaaaaaaaaagtcaaatctcatggtcagttctcagctcttactaagcctgtacttcttggagtaattttaccccccacactttaatgcctttcgctttttattttcgttgacctttttgtctcttctccctcctccaaccacatttattttgtttgtcattgatataaatgatgcactctgctagactcagctctcacagctgtatcttccttatctaaaatctttctatggatagtgaagccactcttatggctttaattaatatttctgatacagcagagtataactcactggtaaacaaaaaaattttttctttcatgagagcaagttcaagccacatcatcatgtttacaggctacattaacaatgcaaaaatagttttattaagtcctatgcagagatatgtattattgtaacattagcaacttgtgatattacagttcctggcttataactcccatatcctttgttagggttttttttttgtttgtttgtttgttttaacattagggggttttaggcctcaggagcaggcctcatgaaacagaatctccctctctgaccttaccctgtcctccctttacctacctaaggcaggactataatctgattgtggctcaaaagaccctcatttcagagagggtcccaccccataccctagaggaagaaatgctataaagagatgtcaagacaaacctgaacagacaagctttactgggtttccccactcaaactgttagtatgggatcataacctttttgtccaatcgcatttctacatggttgtcaatcgtgactatgtaatgaagcttccataaaaacccaaaaggacagggttcggagagtttccttacagctgaacacgtggagggttcctggagggtggcacacctaggggtgcgtggaaggctctccagtccttcccccataccttgctctatgcacctcttcatttgtatcctttgtaatatcctttacaataagccactaaaggtaagtgtttccctgagttctgtgagccactctagcaaactaattgaactmaaaaaaaaaggggtcatggaaaccccaacccagagccatttggtcggaagatctggaagcccagacttgttactggtgggaaggagggggcggttttgtgggactgagcccttaacatgtgggatctgatgctatctttggataaatagtatttggattgaactggaagatagccagctgatgtctgatgcagagtcaattgcttgctttctagtggggagaaatctccacctacttgggagtaaccagtcttttgtgttagttgttgtgctatgagaccagaggaaaaatggattgtttctcctaaaaccagattaatgtcaacaaaagaattgacattgtgttgtagccactaaatattaaaatatgggcgtatattttgagtagcaatgcagaggccgactgccaatcaatcttttatcagacacaagtatatggacacacttttacatgctgtgcacatggcttttcagagttcaccaggtgaagtgcaagaggcagtgcccactccactcagtccttgctcttccctccttttcccttgtttctggttctctctgcgtaagctgggcaggacttgcttctgagttcctctggggacctgctgcctggggtggggtgatcactgctgtgctagcaaaatccagaatactgtgggtcttgccctattctggacagtgcgatgtcatgttttccttgcaaaaggcaatctgctccatctatgcaagtttggttggaggagtctggaggtatcaattagggcttttgtctacactcaaagtcatttccttggagacaattctcccagtttctactttgtgtgagcagaagggctgcatttggggaccttggctggctgtagcagtagggttaaggatccagagaaccagcctaggagttgtagtagaggctgctggtgcctcccagttccatgtcctgctgatgatactctactgcaagaactgcactgtttctatttctatttctttctttccttctttctttcttttttttttttgagacggagtctcactctatcaccaagctggagtgcaatggcgcaatctcggctcgaggcaacctccgcctcccgggttcaagcaattttcctgcttcagcctcccgagtatctggattataggcgcccccgccccccacactgctcccttccatgcccagctaatttttgtatttttagtagagacagggtttctccatgttggtcaggctcatctcaaactcctgacctttggtgatcctcccgtctcggcctcacaaagtgctgggattataggcatgagccaccgcgcctggccgaactgcattatttcatctgaagatttgctctcagctagtacatgctaagtaggccagaaagggtagattcatgtggcagtgacatgctggaggagggacaaggttattggtcctatgatttagtctcagtcttttagtgagcctgtacccmtgggtttatgaacttcacttggcttttttcttctgccattagttggcataaaaacaagctagagatgagattttccctttccccaagttaaagattagagtggctggggttggcatttttccttcccctaggtaggttaggctctggtaaaatactttactttgagggcaggcttttgttaagaagaacagaccagaactctcaaggttgtccaccctgagcctccaccaattcgtcaattacagttcaagtgaacccacggtactggcgccagccgcagaggactctgctcgcagtacactcttaacctctgtatctgcctatctctgcagttctgaggaccgcagtttatcctgtgatctcaattctctgatgcatcctagaaaagttgtygattttcatttgtttagcttttttcttggtgtgagcatgggaaaaatgactgccaagctctttaygagttggactagaaactccacgggaggtttaatatttttaatctaagaaggtcaagaagtaattttttaacctcttgccaactcatctcagttttaacttttatttcagtgcttccttttacaaattgttacataataatgacatctttttgtgaaatatgtggtattcccacccacctgggcatggaaaggccctaagaggtcagcaagcagttagagaagctggtgtttaccggaaactcaggagaaccagccaaccacaacccctgggttaccttggcaattgcagaataaatgcattatagttactaaagtaaaaaattagatatgcctgtttgcagattgaactataaaaataccattcaaagacaaatagatctaaaaataaaatggaaaaacataaacactaattctgtaaatattatacttaatgcacaactgaaacaaaatttgccagcttactcaatatcaaaatctatgaacagtttttctattttatataatttccctctcctctctctggatctcgctccccagctcattttttcttttttttgctctgattctttatacacctctgytgcctctgtgataagcagcttcaaagatggttcctaatgctttattggatagaatacaacaaaagcgatgaggtgttgcttccccaattacattacgaagcatccgtggcttccatctccagtgggttcacttgctgtctggctctaagggaatccagataccataatgcgggctgccctatggtgaggtttgcatcactaggaactcatgtctctgggcaacaaccaatgaggtcttgatccctgccgtcagccacatgagggagcttggagctcggaagtgaatcctcctggagtcaagccttgatrtagctagccctggcagctgcttgactgcagccttgtgaaagagaccttgggccagaggcaccagctaaactgcccctggattcctgacccagagaaagtgggagatgatgtatttttgctttttgaagctgctgaatttggggataatttgttatatagcaatagaaaatgagtaactcttttgtattcctctttgtcctggcttccccattttgaggaaaataaagtaaatcaaagtgtagagctgaaatattcacatgaaaataataataaagttttaaaattatttgaatgtcttgtgttgacattccaaaatatatgaattccaaaaatttatatgttgaagtcctaactgtcagtatcttagaatgtaacttttttggaaaaggggtcatttcagatctaattagttaagatgaagttatactggagtacagtgggcactaaatcgaattggtcctatgattgagtctcagtctttcagtgagcctgtacccctgggtttatgaccttcagttggcttttttcttctgcccttatttggcataaaaacaaagcaggtggatcacctgaggtcagcaatttgagaccagcctgcccaacacggcgaaaccctatctctactaaaaatacaaaaaattagcctggcgtggtggcrggcgcctgtaatcccagctacttgggaggctgaggcaggagaatcacatgaaccmgagaggcggaggttgcagtgagccragatttcgccactgcactctagcctgggtgacaagagtgaaactccatctcaaacaacaacaacaataaacaaacaacaacgatgacaaaaaaagctagagctgggattttccctttccctgtgttaaagattagagtggtgtcctcacaaaaagggaaaacttggatacaggcacacacatggggagaatagcatatgaagagacacagggagaaggcagccatctatgggtcaaggagagaggcctggaacacatctttccttcaccgccctcaggaggaaccaactctgctgacaccttcatctgggactcccaccctccagaactgcaaagcaataaattttttattttttacaccacccagtttattgtattttgttaggcagccctagcgaactaatgtacatagagttcttgagttaatcttcacaaattactgcaataaggtagggtcttttgttatgtaacaatgctatgaaatcatagcgttttcttaattaacttccgtagtttaaggtactaagttctggacaccacgtgtcttctttctataaataccaggacatgctctgtttttcagcactcattggacttcagcatgactactcagttgccagcttacgtggcaattttgcttttctatgtctcaagagccagctgccaggacactttcaytgcagctgtttatgagcatgcagcgatattgcccaatgccaccctaacaccagtgtctcgtgaggaggctttggcattaatgaatcggaatctggacattttggaaggagcgatcacatcagcagcagatcaggtaccatctctaccatctctccagtgtactggattctatgagaaaggagggggtcctaggagacagggccactgtcagggtcagttacacttttagatgatatatgtatcagagtagccaagaacctttattttacagttagaattctactttcctctcaaaattagagcaaggacttccctaaaagtaagaacaaagttaagaaaagaacaatttgctcattatcaagaagcagcagacctttgaggaactggccataaattcaacatctttgttccccttttctggtacagatggaggatggaggataaatgggtcagggactaggtgctattttcagagtattagtggccttcatgtactcatgtgctattaaggctttrcaggttttcgaataaatttataatctgaaaacaaatttaagttttcaattccttgccagcatgcattatatacttcacacttcattctaattacaagataaaagtatatgtaatgcattgtgagtccttaagtttagtgaaggtttcagtttgaagttaatcatacagtataaattgtggtttacacaaatattattttaaaagctattgatcgattaggtgtagaccaggaatacatgaagtgtgataaaagtcatggataaatgtgtattacatatatctataaatatatattcttttgtgttgttgagttaaggtctcactctgtcacccaggatggagtatagtggtgtgatcacgtctcactgcagccttgacttcccgggctcaggtgattctcccactacagtctccagagtagctgggaccacagatgcatgccaccgtgcccagctaagttttgtattttttgtagagatgggattttgccatgttgcccacgctgkacttgaactcctgacctcaggtgatccacctgccttgggctcccaaagtgctgggattacaggcatgagctaccgtgactgccctatattcttatatatactaatatttaaaaggttatcaggagttctgatgttctttttcatccttagtccaactatttccttgaaggtcacagagctttttaaggtgactctctaattggaaggtgcccaggttagctcaggcagtacttgtaggcatgggacagttcaagtaaccagtttgtggctcctctttttctgagaagcaggaatcatgtttgcaggggaaagctagggcagaggaggaaataaacagaatatttaagttattaatcagtcttgacacaggcacagtcatcagcgaaagttcaaggagaggcttggttccaggataagctaggtttatagttaacgactgccataggaaacaacaatggcaggattagaaaattaaaatgcttgactaagccaggtgcggtggctcatgtctgtaattccaacactttgggaggctgaagcaggcggatcacctgaggttgggagttcaagaccatcctgaccaatatggagaaaccccatctctactaaaaatacaaaaattagccaggcgtggtggcagatgcctgtgatcctagctacttatgaggctgaggcgggagaatcgcttgaacccgggaggtggagattgtggtaagccgagatctagccattgcactccagcctgggcagcagagcgaaactccatctgaaaaaaaaaaaaaagagagaaaaaaaaatgcttgactagaagcccaaacctcaccattatgtaacatatccatgcaacaaacctgcatttgtaccctttgaatctaaaattagaaataaagaaaagaaaagaaaaagaaaaagaagtgacagtgcactgaaaaaaaaggaaattaaaatgctttggaaaagaaaataaattataaaaatatagaaaacaaaataagatttaaggggtgtgggggaagcccaaatagttgttactcagccactcagctcctcagctcctcttgcaggcccccctttggattaagttgcatttttaacagggtgcgcatattattgtgactccagaagatgctatttatggctggaacttcaacagggactctctctacccatatttggaggacatcccagaccctgaagtaaactggatcccctgtaataatcgtaacaggtaaagaaacaacttgtgaaaaattcactagtaaacatcaacttgatttayctgggaaaactttgttgatgatcattgcatagatccaygatcaattcttaagtttcagtatagcttatttttcatstactatgggtatatttactgggagagcaaatatgaattatgaagtcacagaartcagagctagaaagtagcttagaaatcatcacattcagtgtgaacatctctggtctytgactcctcaccagtgaacagaaaaatatttccctgtgtaggtctgtgatttgaaaactatatgagtaaatggcaaaagagagtcacatcagtttaagattaatagttttcctttctcattgctaagatagctgatgaggttaatgtagtaaagtccttaaagtgtaagctgattgtaatctaagaggtgatatggcaggattttaagtggtttaagtcaggtctcggctacagagatattaagtgtggtgaaagcagcactattaattttaatgtaaggaaaccaatatcttatacacctaagaaaatcatgtcgattcacatacttctttctgaatrcacatggctaaaattattttaggaattcctcttttggaactattctcaaaaccgcacaacgccagttagaatggtgatcattaaaaagtcaggaaacaacagatgctggagaggatgtggagaaaggggaactcttttacactgttggtgggagtataaattagttcaaccattgtggaagacagtgtggtgattcctcaaggatctagaaccagaaataccatttgacccaccaatcccattactgggtatataccaaaggatcataaatcattttactataaagacacatgcatgcatatgtttattgcagcactgttcacaatagcaaagacttggaaccaacccaaatacccatcaatggtagactggataaagaaaatgtggcacatatataccacagaacactacacagctgtaaaaaaggataagttcatgtcctttgcagggacatggataaagctggaaaccatcattctcagcaaactaacacaggaacagaaaacaaaacactgcatgttctcgctcataagtgggagttgaacaacgagaatacatggacacaaggaggggaacatcacacaccggggcctgtcggggagtcgggggctaagggagggatggcattaggagaaatacctaatgtagatgatgggttggtgggtgcagcaaaccaccatggcacgtgtatacctatgtaacaagcctgcatgttctgcacatgtatctcagaacttaaagtataataataataatactaaaattaaaaatcccacagaaactggctgggtgtggtgactcatgcctgtaattccaacactttgggaggccgaggcaggaggatcacctgaggtcaggagtttgagaccagcctggccaatttggcaaaaccccatctctactaaaaatacaaaaattagtggggcgtggtggtgggcacctataatcccagctacttggaaggctgaggcagggagaactgcttgaacctgggaggcagaggttgcagtgagccaagagagtgacactgcactccagcctgggtaacagagctagactctgtctcaaaaacaaacaaacaaacaaacccacaaaaactacttacagagacaccttgattttgacaaggtggattttgataaattccagtgttatttatcataatcatttactctattcttatttaattgtaccataattatttcttatttaatcatgtcatatgtcagtgcttcagtttctaaaaggcaagcactctattatcacttccactatgaattgaattgacttatttctgaatggcctttccctagaacctcatctccaagggcctcctgaacatccccacaaggatgtcccattcacttcatttcaaggaacacggttgcccatttatgttttccatcaactaatgatgtctgaatgtcttgccttaattctctctgtctctctctctcttttttttttttttgagagagagactctgtgtcgcccaagctggagtgcagtggcgtgatctcagctcactgcaacctctatcccccaggtccaagcaattctyrtgcctcagcctcccgaagatgacaagtgtgagccacaacacccagctagttttttgtattttcagtagagatgggtttcaccatgttggccaggctggtcttgaactcctggcctcaagtgatccacctgctcggcctcccaaagtgctgggattacaggtatgagtcatcatgcccagctgccttaatttattaactctgcaaattttttttgagtrcctattatgtctaaacattgttctgggcaatgaagtgaacaaaacagattaaaaattcctgtccccttgaaatttatattctagtgtggggaggtaataaatkttttaaaaagataattatctatctatcatctatctatcatctatctattatctatctacctatctttatataggtatctttcatctgtctacctatctatgatatgaggtggaagtaaatgttatggaaaaaataaagtggggaaggtgaatagggtggcaagcgtggggctgaaattttaaaaggtcgtctgagggcatcacagtgagatttcagcaaagacctgaaagaaatgaggcaatagatcatgtgagtatctgaaaaaagtgcattccaggctgaaggaattctaaattccaagatcctgtggtcagagtatgtgtctaacctatggaasagaaaaagggttagtgtggttacagtgatgtgacagaagaggagaaaagtaggaaatggaggcagaagggcaggaggagcrcaatgttgagaatagactccagggtataggtcaccaaagaagcagagggcagttcaaaagctgttgtgatcattatggcatagagatgatgggtctgagaccaagaaatggtagaagtttaggtattgagaagtggacagattccgaataaagtttgaaagtagcactggcaggttttgttgaaagactggatgtaggatgtgagagaaaaggaggactcaatatccttccctgctctcatagaatcagatctcatcttattgagtatgtttgaagtatgcacatagttgattgctttctcttctcatattcaccaaacttttgggacctacatcacctcttagactgagcgttaaaggaacaggctctcatcacttttcttttttatttaatttatttagcatttatatgtcatatcgttccagaaggatttgaagtttctaattatatctaatataattaaaaataggatactttagttctaacaacaaactagaacccatatgaatagaggaagcagttgtyatgaggcatcatggtaaagagctgctcattacaactggatgttaagtatagttctaagagtttctgagcagctaagagaagtacaattttgttcagacactttgattgcatcatagaagaaagcttgcatatttcttcagagacaaactatgtctaataacctaacttaaagatgaatttacttattcaactgtttttgttaattattttatttttaactttcatgggtacatagtagatgtatatatttatagggtacatgagatgttttgatgtttgtacacaagcatgcaatggtaacaatcacatcatgaagaatggggtttccatcccctcaagcatttatcctttgtattacaaaccattcaattatgctcttttaggtatttaaaaatgtacaattaagttattattgattatagtcaccctgttgtgctattgaatactagaccttattcattcattctaactatttttttgtacccattaatctcctcactttctccccactcctcccctaactacccttcccagcctctggtaaccatctttctattctctatctctatctccatgagttcaattgttttgattttcagatcccacaaataagtgagaacatgtgatgtttgcctttctgtgcctaacttacgttatttcacataacctaatgatctccagttccattcatattgttgcaaatgactggatctcattctttttgtagctgaatagtactttattgtgtacatgtaccacacggttgtttccaaattttggctattgtgaacagagttgcaataaacatgaaagtgcagatatcttttctatatactgattttctttttgaggagtatatacccagcagtgggattgctggatcgtatggtggctctatttttagttttttgagaaaccttcaaactgttctctacagtgactgtactaatttgcattcccactaacagtgtatgagggttcccttttctccacatcctcaccagcatttgttataagtcattttaacaggtgtgagatgatataattgtacttttgatttgcttttttttttttttgagacagagcctccctcttgttgcccaggctgaagtgcaatggtgccatcttggctcactgcaacctctgcctcctgggttcaagcaattctcctgcctcagcctcacgagtagctgggattacaggtgcctgccactacacccagctatttttgtatttttggtagagayggggttccaccatgttgtccaggctgatctcaaactcctgacctcaggtgatcctcttgcctcagcctccagaaatgctgggattacaggtgtgaatcaccatgcccggttgatttgcagttttctgatgatcagtgatgttgagcaacttttcacatgcctgtttgccatttgtataacttcttttgagaaatgtctgttcaaatcttttgcccatttttggattggattattagattttttttcctatagagttgtttggacttcttacatattccggttatgaatcccttataagatggatagtttgcamatattttatcccaatctgtgggttgtctcttcactttcttgatagtttcccctgctgtgcagaagctttttaccttcatgtgattccatttgtccatttttgctttggttgcctgtgcctgtggggtattactcaagaaatctttgtccagaccaatgtcctggagagtttccccaaagttttcttttagtagtttcatagtttgaggtcaaatatttaagtatataattcatttttatttgatttttgtatatggtgagagataggggtctactttcattcttccgcatatgggtatctggttttcccagcaccatttattgaaaaaactgtcctttccccaatatatgctcttggcatctttgttgaagacgagttcactgtagatatttgggtttatttctgggttctctcttctgtttcattggtctatgtgtctgtttttatgccagtaccatgcagttttggttactagagctctgtagtataatttaaagtcaggtaatgtgatttctccagttttttttctttttgcttaggagggcttctggatcttctgtgtttccacgtaaatttcagaatttttttttctatgtctgtgaagaatgacattggtattttgatggagattgcattgaatctgtagaatgctttggatagtatgggcattttaacmatattgattcttccaatctatgaacatggaatatctttccatgttttgtgtcctcttcaatttcttacatcaatgttttacagacttcattgtagagagctttctcttctttggataaattaattcctaggtattgtattttatttatagctataacaaatgctattcctttcttgatttctttttcagattgcttgctgttggcacagaaatgctactgattttttatgttgattttgtatcctgcaactttactgaatttgtttgtcagttctattagttttttggtggagtctttagggttttccaagtataagataataacatctgcaaacaaaaataattttcctcctttccaatttggatgcattttatttctttctcttgtctgattactttagtgagaacctccactactatgttgaataatagtggtgaaaatggacattcttgtcttttctagatcttagagaaaagctttcagttttccctcattcagtatgataccagccatggrtctgtcataaatggctattattgtgttgaggtatgttccttctatatccagtcattgagggtttttattatgaaggaatgttgaattttaccaaatattttttcagtgtcaattgaaatgaccatttggtttttgttcttcattctgttgataygatgtgccacatcaattgatttgtgcatgttgaaccatccttgcacccttgggataaatccgacttggtcatgatgaataattttttaatgtgtcgttgcatttggtttgctagtattttgttgaggtttttttgcatcaatgttcatcagggatgttgggctgtagttttcttttttatgtgtctttgcctggttttggtatagtataatactagcctcattgaatgagtttggaagcattcctttctctattttttggaatagtttgaataggatttgtattagttctttaattgtttggtaaaattcagcactgaagcctttaagtcctgggcttttttttgctgggagatcttttattacagcttcaatcttattatttgttatytgtctattcaggttttggatttctttgtggttcaatcttggtaggctgtatgtgtctaggaatttattcatgtcttttaggttttccaatttatcggcatgtagttgctcatagtaatctctaatgatcttttgaatttctgcagtattggttataatgtctcatttttcatctctgagtttatttttcttctatctttttttcttagtctcactaaaagtcaattttatcttttcaaaaagaaactttttagttttttttggatgttttttatttcaatttcatttatttctgttcagatgtttattatttttcttctactaatttcaggtttggtttgctcttccttttctagtttaaaaaaatatatcattaggctgtttacttgaaggttttcttctttgttagtgtaggcacttatagctataaactttcctcttagaacgattttgctgtatcccataagttttgatatgttgcatatccattttcatttgtttcaataaaaattttaaatttcttcttaatttcttcattaacctgctggtaattcaggagcacattgtttaaattctgtatgtttgtatagttttcaaaattccctttgctattgatttctagtactattccactgtggtcagagaagatacttgatatgatctcaattttttttaatgttttaagatttgttttgtgacctaacatatggtctctccttgagaatgatccatgtgctggggagaagaatgtttattctgtagccattggatgaaattttctgtaactatctattaagcccacttggtctgtaatgcagattaagtccaatgtttctttattttttttttccttctggatgatctgtccaatgctgaaagtaggatgttgaaatctccagctattattgcattgggatctatctctctctttagctctagtaatatgtcctttatatatctgtgtgctcaagtgttagcacacttgtgtgctcaattgttatatcctctgacagaattgacctctttatcattatataattaatttctttgtctccttttatggtttttgtcctgaaatctattctgtctgataaaaatatagctacccctgctccttttgttttccatttgcatggaaatctttgctatccctttattttctgtctrtgtgtgtctttataagtgaagtgtgtttcttgtacacaatcgaccattgccattgattttttttcttttttatccatttagccactctatgtcttttgattggagagtttagaccatttacattcaatgttttattgttaagtaaggacatactcctgccattttgtttttttgttttctggttgttttgtggtgttgtcttcctttcttcctgtcttcctttttgtgaaggtgtttttctctgatggtatgttttaatttttgcttttcattttttgtgtatctgttgtaggttttttgatttgatgttatgcagcttgtaaataacaacttatagttcattattttaaagtgatgacaacttaacattgattgtataaactaacargcaaagagaaagctaataaaagcttcatactttaacttcatcccccatacttttaatttttaatactttctatttatatcttatactgtctatgtcttaaaaagcttttataattattatttttgattggttcatcttttagtttttctactcaagatatgagaagtttacaccacaattacagagttataacactccatgtttgtctgtgtacttactagtgagttttgtaccttaagatgctttcttattggttattgatgtctttttctttcagattgaagaaatttctttagcatttcttataagagaaggcagtgggttcttttctggctcagggtgggtctagaaatgccatccaggagctaagtcctggaattgaggactttaggagtctgcttggtgcttyatgttactgtggctaagttggtacccaatttgtaagacaaagtccttttactcttccctctcctttcctccccatgcctccccatggctacaacagctgggaatgtgctgggtcacacctgaaaccagcatggtactgggtcccacccaagcctsgtggtgagtactgcctggctatcactgatgtttattcaaagcccaagggctctttagttagcaggtgatgattcttgccaggactgggtccttccatttaaggcaagaagttcccttatagcctagtgtatgtctagaaatatcatcagggagctagggcctgggttgggggattcagtactctacttggtgctttattttactgtggttgagctgttatccaagttgcaagacaaagtcctctttatgctcctgtctcctttcttaaggcagagggacggagtctctcaaagctgtgagctgtgctgcctggagttggaggagggttgatgcaaccactcctttgactactccagctggtgtctcactargttatgtgcgctccaaggctactggttctgagctcagtacagcactargacttgcctaggaattgtagtccttgtggcctaaatcagctgtccccaacgtttttggcaccagggactggttttgtggaagacaattttttaatggacagggtggagtatgctttctggataaaactgttccaccttagatcatcaggcattagttaaattctcataaggaacatgcaacctagattcctcagatgcacagttcacaacaggcttccattcctatgagaatctaatgctgcaactgatctgacaggaggcagagctcaggcagtaatgtcactcatctcctactgtgcagccagtttctaacaggccatggactggtactgccgtgcagcccaattcctaacaggccacagtccatggcatagggattgggaacccctggcctagactgcctttcaagtttatttagaaccccagagaactttatcccacattggtgatccttggtagaactcaggttctgactgctgggtaggacaattcctctctgacaagagctgttctaaatgtgccctctgtgggcactggctgaattctgtgccatgttgctttctgctgttacawggcaacactgacttccaatgtaaagtcccacaatcactgtactttccttcccccaagggcacaaattttctctccacaccatgtggtaacctggaggatgggggagagtggtattggcaattaaagactttctttcttacctccttcagtgcctctttccttgatatgattttaaaacaaggtactgtgattactcttctgatttttggttcttatgaaggttcattcttgttgtggatggttgttcagtttggtgatcctgcaggaagacaatygctggaaggttctatttggccatcttcctctgcttcctcctcatcttttatttcttcctcttgcctgattgctctggctaggacttccagtatgatgttgaatagaagtggtgaaggtgggcttccttgtcttgttacagttcttagaacaaaggctttcagcttttccccattccataggatgttagctgtaggtgctgacatatacgccatctatagcctttattatgttgaggtatattccttctgtataataaagtgcacatgtctgaattatatattacttgccttgwgggtgccaagaaactatttatactgcctagaatattaacctttattatgcctaaagagttcattagtcaaatgttggttttgatgtagacctcatagtttaaaatttaacatttaaattaaatgggttataatttttaataccacctaaatacaatatattgatccaatatagaaagttagatcaatgttagaaataaagagtcacagtgtacctttccagacttgtcrttagcatttcatatttatagttttagctttgatttgaatgtytcacagatgaacttaaatcaacacataattccaccatagcataatagtaattaggcagtttccctaaatttgagaacattgccttaatgtagttgtgatgttttgaggcttcatagcttaaatccattataccattatggaatctatagagcagggctatggagaaaggcttcagagaagttttttttgctactataaccttatttaaagaaacaaacagaaaaaaacccaaacgtatttgaagtctgcttaaatattactgttaaatgtgaagtgtttatatctracattcataatcatatgaatgtcaacatttagtttcgagtagaaaaagataaatcattactgtgagttaagaaatttaaatggagatgtgtgagggagcatgtccatttcatccttcccatctccaccctccccagagtttcatccccagggtgcccttcttggtttccagcctctggtgttctgcttggggtcttgacttcttcccatgccactcaggctcagccccagactagaacagggtttgggaagcagtggggatagccaagatgggtgtcagtgggtggcccagcagtttctgtcccaggagtggccacaggccaggggtagtggtggctgtgcatgtggccagcctgctgccattgtcccatccttgtcagggccctctctttcaccttacagcatctgaggggcagagctctagagkgtttgggcagacaatgcctctgaaaatttttttttaaataaaatttagatgrcaagtatatatcatatatgcagtgaccaagcatataactactttacagtcrtctaactgctgtagcaatgatatgtaactacagtgtcaaaacaccctgacagttttcagaaacccaatgtggagaccatctgccatatcttactttttctttaggtacaatattcaaattcatattgattttgcttacatatgaatagtttcaaatttgttcacatatggtttaaactttttgtccctattgtcttactcaggcttgtgtaacttaaaatgagcctgagcatgggtctacacacagcaagatgtgtaataaaaacacaattttagtgctactttcaaaattcatgctrttaagaaagatgytgttttcaaagctgaaaagatcatgaaatggctaacttacatatcagaggttggataattccttactattgaggtgttatattttctgtgtagtaaatgccttcaaatattaactgaaagatcagtgaagtcattttccccttygtgattccaacttcattttgtttattttgaagataattaatattttaattgcaaaagaaaattatagcattggaaaattttctgtayatggagaataacaatgaaccaaatttaccaattagggaaccatttcaggaattgttggatggtgaatttttcttcagtaactatgctttagttgcaatgcagtatgcccagaaacaatccatttcaacttctgaatgtttgatttggaacatttgtttgatgagtattcagttaaacacttggatacaaactctttccagaaggtcacatctctaccatttatcttggaatgtttctgaagacattctactcattttattaactgtatacacttctgtttttggatctccaatatgattatagacaatatcaacatagaaggctttgatttagactccaaagtttagagcatttgatcttgacatgccttaaattgggcttccagtcaaaattgaggccacttctcctttcaaatggcaagttcycttgaatgagtgaatagtggagttgtagaaattgaaaggcagtagtagctttcactttacattacaacttctccaatgcaatcttttccattctcatcaagtctgaaaccgtgaacctatattcacctatttggaacacatcagttgccaatgggacatccctttcctcttctattgattttacagccgaatagaagaagctcagttcaacacatccaaggtgcttgggctgcaccttcatttaacacaggaatctgtccagtaaattcacagagaaaatgcctttgtgttaaagccaaagaactgaattagactaacatcttgtacttcaaagtcctgtagccttgcagtcattctgaggctattgtctatcatgtgcaaactcaattagtctcaaaccacagatctttaactgacatctagacttcagttccaacaaggcattcagctggtgtagcagtttctgacagtcaggtttcagtacctctatcatcttgatagtgattgagcctcagtggtaaccacccttcttgggcctgcactcacctcaccccacraaatccaatctcagaggcctaggaaacaaagcaaacagagaggcccagggaggggaagccttcctgggtggatgtctctgcagagccaccaagatcatattgcyctcatcagggtcagcttggagctgaagggctgaaaaggcattttgatatttgattgcatattatttcatacygttatttcagagttttgtgtgcacacattgtttcttcagtaagcctaatgctttataagcatagcaaccacatctgacatttctatgtctctcacattgtatgcttggacagctctgcctggaatattcttcccccagttgcccacatgtccaayatagtgctttgtgttgtgtcaaaacctaatgcatatttgttgaatrtttaacatgtgctgattttagattagtaaatatctttccgataattgatgatttttgttatacctaaagattgaacactttgaaagcagccttagaaaatgcatttcaattattctctttcacctcctccttctgtgcccagggcaaaactctgcatggattaaggactcagcaaatatcatggatgaagcaacaggcagatttcaggcaccataagcaaactgaatttttaaaccctaaattaggacatgtggtctaattttggagcattttatgtrtacrccaaacagcctgagaaatgtagcttgaattgaaatatattagaatacatgaagactaatagagtcagtaggaaaatatgtttgtcatcagaactgtttcagaaatccmaaacaccaacctacttattccaccacttaaggtgatccaaaaagactgggggtaaacatgtttcaagtggttcaatgtgttgtaatttatatctatgcatttcagatatcaattgaagcaaaggtgggttaaactattgaayggttgttctttcttacaaacacattgaaataataattttctatatgtattattatatccttttccartctttttcaaggatatgttttatagatgattgctatggctttccttatattcattatacaaatttktttgtagatctagtagccaatatttgatgtcaccaaatttttattcatacaacagttatctcagccttctcagctattcttcaataaccatttatcatttcagagttgtgcaatrgaggataaatatagcaatatgttaaatattattttcaaaattgtattttaattgctttactgggacaattattggtaactttgtaaaagaataaaaaaatcaggcattaacaaatgctccaggatttccatwgtttcatactagctggtactgccctagccaatccttgttacctcttatttgaacaatggcaacagcttcctaatgaatcccctgcatttagtctctcactgttccagtacattctrcactccgtgttctatttatctttatgaagaaaattttgaccaggttgcttctgtcttcaaaggctttaatagtacctatttattactaaatttggaacaaatcttagcctcttgtgcaaagctcaatatccatccttccttccttccttcctccctgcctcccttctttctttctttttttwaaattttttaaaytttttatttttttgagacagagtctcactctgtcacccaggctggagtgcaggggcgcaatctcagctcactgcaagctccacctcccgagttcacgccattctsctgcctcagcctcctgagtagctggractrcaggcacctgccaccacgcctggctaattttttgtatttttagtggagatggggtttcaccgtgttagccaggatggtctcgatctcctgacctcaggtgttccactggcctcagtcttgcaaagtgctaggattacaggcgtgagccactgtgccctctcctctcctctcctcccctcccctcctctcccctcccctcccttctctctttcctttcttctcaaatctgagaatgtcttcatttctccctcccttttgaagggcagttctgatggatatagaattcttggttgtcagatttttttttctttcagtactttaaatatatcagctcaatgctttgtggtctccaaagttattgatgagaaatctgccgataatcttattggggatcccttgtatgtatgagtcacttytgtcttgctgctttcaagattctcattttgtctttggctytctacaatttgattatagtgtgtcttagtgtgagtctctttraattcattctcttggagtttgttgagcttcttggatctttatattcatatctttcttcaagtttgggaagttttcagccattatttcttcaaataatctctcttctccttctgagactcccacartgcatgtgttggacactcaatggtgttcctaaggctctgttcaattttctttaatattttttgttgttgttctgcagactcaataatttcaatggtcctgtcttccagttcactgtttcttttttctacatgcctgaattggtcttcgaatcctcctataaaatattcatttcagttattgtaattttcagctccagattctttttaggttttctatctttttattgatatttctactttgttttgttttttgattttctccacatcttcctttattttcttaagcttctgtaaaaccattgttttaaagtctgtgtttagtaggtctgtcatgtggtccttttcagggatgattttmgttggtttatttttcctttcttttgagtgagtcatactttcctgtttctttgtatgatttgtgatttttttggttgataactagacatttgaatcttaycacatggttactctgggaatcagattctctgggtttgctatgtttgtttgtttgtttgttttgttgttgtaggaygtttgtgttgaggatcagcttgagatgtaaatttaaggtcttcttagaccttttatgagtctgtrcctttccctgggcatgtatggcgactttctaaatttccctgtatatttaattgcttattccttaaatgtctcactatccaaaggagaaaaagagaaaataaataaataaataagacactggttctttaaatctcctggaagccacttcagccagaaagagggcctgcaaaaatggtgtgtctgtatgtatacacaacaatagctgcttgcctttgcrtttgtacctccatgatcagaagcaacaattagtgatcagaatgcagatctcgtatatttgaaagacaaggtcattattgtccaccctgctcccataagctgcctgcaagctgctttaggaacacagacatggcagcctgtcacagggacaggggatgaggaattggtaaccactattgagctaagagctaaaatggactgaaattaactgtaagttaccttccaagcattcttctggaagttgcaagcactagagctccaaaatagtaatattagacagattccaacagtgcaattgttatctaggtggggagaaaaattccctgctctgctatcttcccagcatccytctacctctaaatttttgttaactcattcaaaaaaawttttttttgagatggagtctcactcttgttgcctaggatggagtgcaatggcatgatctcagctcaccacaacctctgcctcccaagatcaagcaattctcccacctcagcctcttgagtagctgggattataggcgcacgccaccagrcccagctaattttgtatttttagtagagacrgggtttcttcatgttggtctggctggtctcgaactcctgacctcagctgatccacccacctcggcctcccaaaatgttgggattacaggcatgagctaccacacctggccccccaaaatytgttttttgagacagggttttgctctgttgcccaggttggaatgcagtrgaactcactgtagcctcaaaatcccaagttcaagcaatcatcccacctcagtctcccaaatatctgagactacaggcacacaccactatgcctggctattttttttttttttcattttttgtagagagacagtcttgctttgttgcccaggctggtctcaaactcctgggctcaagcaatccttcctccttggaytcccaaagtgctggaattacaggcatgagcaaccacacccaccccaagatattttttaatgcctctcttctgttagacawaattttagtaaacrggatatgtaagtcattgatctatgatatccacaggatgctgcagacattataagacaaacacgtaagtgaaaatatgactatagattacgataaatgctatgaagaaaaaatacgtggtctggaatcttatcctacagtaggttcctacaaccaattttactcaagcatgggcttcctctgaactcctttcttgtcttaatacttctcttctaattaytgttatttagaatttayttttgcatatatcaaataataggtttaggcaactatcattcaggattttgttgagagttaagattgatttacaaagatttttttcctccaataaacatgtatcagatttggccagaccccagtacaagaaagactcagctgcctggccaagaacarctctatctatgtygtggcwaatattggggacaagaagccatgcgataccagtgatcctcagtgtccccctgatggccgttaccaatacaacactgatgtggtatttgattctcaaggaaaactggtggcacrctaccataaggtaaaattaatttgcaaataatccaattagttaatgcctaatgaaataaagtgggcaaggagaaaaatatgttattgataatgataarcacactttagaaatcgagtaggsgcaaagcatagaaagtaatgataaagygtggaaagctcctataaagaggcttaaggggttccgtgtacatataagaacacaggagtgtgttttcaggagtgtgtagcagtcagaaagtgccgcatgcattatgttgcctaatgttgccttttggactttgtccttttaaaggcataccctggcaatgggtcaaggctagaatgaaaaactgcttaccacatagactctgtcttgaggagaatggaacaaacaaagttccttgccaaggaaaacagttaagtctacttggcaaacagaagtaatctattttatgtcttataagattccagtgggtctttatagataaagatacccatgtacatatttgtaatgtggagactgaactaaaggcccartttagctagaatggcctctgattctctaaagcaaactcatttcccatgaaaacactgatcatagatgaaattggcactaagatgtgagcttgtactttttcccacactgtgatgtccagatcaacttcctaaaataawttttttctctttatcttctgtttattgcagcaaaaccttttcatgggtgaaaatcaattcaatgtacccaaggagcctgagattgtgactttcaataccacctttggaagttttggcattttcacatgctttgatatactcttccatgatcctgctgttaccttggtgaaagatttccacgtggacaccatagtattcccaacagcttggatgaatgttttgccacatttgtcagctgttgaattccactcagcttgggctatgggcatgagggtcaatttccttgcatccaacatacattacccctcaaagaaaatgacaggtaatgtgtgatcttaaagatatgcaggctgatgtaatcagaaaagaaaagaaaaaaaaaacatgtttttctagctaacgcatactccttaatacaatgttttccagctcttaatttttgaacatctagctgttaatatgctatagaatcaatctcagtctaaattgttttgtagatttatttggttttatttaacttgatttttttttcaaaatatatgacttcttacatacaactctcccttcttggcttcttggtttcatactttaattgatttcctctcacttctctgtctttatcagcatrttttactgaaattaataaaacatataacttagagagagtaaaatgtgaatatgaggttaaaatagtaataacaattatgaaatccctttttactttccaatttcaaatgatgttttcaacttattacttccaggaagtggcatctatgcacccaattcttcaagagcatttcattatgatatgaagacagaagagggaaaactcctcctctcgcaactggattcycacccatcccattctgcagtggtgaactggacttcctatgccagcagtatagaagmgctctcatcaggaaacaaggaatttaaaggcactgtctttttcgatgaattcacttttgtgaagctcacaggagttgcaggaaattatacagtttgtcagaaagatctctgctgtcatttaagctacaaaatgtctgagaacayaccaaatgaagtgtacgctctaggggcatttgacggactgcacactgtggaagggcgctattatctacaggtaatattttgatgtcagaagagttactggataaaataaagacactcagttaaatatacagtttagataaataatgaatkattttttagtataagcatatcacacttttggggatttatgtatgctaaaaattttgttgtttatttgaaattcaactttagctgggaagcctacaaatacaggctaaatttatttgctaaatcttttttttttttttttgagacagagtctcactctgtagcccaagctggagtgcagtggtgcatcagctcactgcaagctctgcctcctcggccaagcaattctcacgcctcagcctcccaagtagctgggactacaggcgagtgccaccaygcctggctaatttttttgttgttgttgtattttagtagagacagagtttcaccatattggccagggtggtctcaaactcccsgagctcaggtgatccgcccacctcagcctcccaaagtgttgagattataggcatgagccaccgtgccctgcctatttgctaaaccttgaaaccttagatgtcagttcaattttaagctgattgggaaaaggcaggacatttacttgcagtagcagtattaaaaataaatattcaaattacagatcattataacaggagttcattgaaaacccattttatttcctgcctgaacaaattaagccattttccttatatgttcacaaatgcctatcttgctttataaagagtttgacactaagtatatcctggatatgaatggggttgaccaccaagatagttcaatggaatggtttattgctgcaaagatccaatctctcattgctcgcaagtggcctccatggtcctctcattcttctcttctcttccttggtctggcccccatcttatctcacttaacagggcttcctattgacagtctgacaatctcagctccatccagtcagttctccatattgtagttacagaaatcacaaaaagctktttttgattataatactgtctggcttaaaattcttcactgacttctaattgacaaatcaaattkcttaacatgaaagacacacaaagtctagatgtgtggtcccttcctattctctatcctctaatctcacttctacttacaaatatcctgggcttctgcaatattgaaatattttcccatctcctatttgctagcatatgcagaacctcaaggtgtttgcacagattgtttggtcctttatccgtggcgagccccacctactaatctttcatagcacttttctggtgttatcgtcaccaagaggggttcctggatatttcccacagagctactcctacctctccagatgagttaagtacatcctttatgtgctcccaggacaccctatgcttagctttatcaaagacatattatgtcatagtattcacttacttatttgagactgagaaccccttgagtgctgaaattatgccaactgcacagtattttgtttgctctatgataactaccctaacaatactttttcgttttagcaaatgaaggcctactatatgccaggtatttatttagtgttaatgatatgaagataaataagcatagatcctcctcttgaagaattcagtctttagtaatggagaaagacatttgaacagataatttcagcataggttggcatgtgattgtccgtagaatgcacattttgctggaggagtactaaagagctctacttagattaatttgggaatgcagggaagtttctggagctgatgctattatccaggtgaaaaagagtaggaggggattctttgtggtgtgaagagcatgaacaagggtgtggatgcaggcaggagcagggtctgcagggaacagcaacaggtcagtgctactaaggcaactgaggcatggcttgcgaagctgggtttggtgggaaataagcctggaagcaacatcctgtcctgcaggatcttacctagcacacttaagattcagcctttattctgtgggtgatggtcagctggtggaagtggtccagtgaaggaatgatgtggtcagatctacctttgaatatatcatttttactactctgtagatgatggagcaaagacccaaaagactagattattaaaatagtcttattaagggtctggaccaagactgtgtttgttggaataaaagcagggcatggagtctagacatatttagaaaatggaactcagtggccaatttgatgtggaacaggaaaacggaatggagagtccagaatgtggcagatttctggcaagaatggctgggtgggtgagatgcatctgacagatcaggaggcaagagaggagcagactcactgacagtgggtagaggctgagttcagttatagatgtgctggttttgaagtagttatgagacattcagctggacccagccagttgtctgttgaatactttggtctgatgcttaagggagatactagaattagaaatattgtttcaaaaatcagcaagatacaaggggcaattaagcaaacaacagtgaatgatacgacaaaggagactgtactgacagtaaagaactattgacaaagtagaacctttgggagcttcggtatttggggcaggaaaggacagaggacaagaaacctgcaaatacaattaagaaataaaggaaaatttaaaaagagaacatctggtagatgccaaggaagtagagactcttggaggaaagaaatcatgaggtgtattaacacaatacgttgaccattattagcatttttgagtataattttggcagaattttctgagctcataatgataggatgatgggcagattatattgggttgaaaagtcaaagggaagtgaatgcayttttttccccaagaaatcttatctgagacaagaagaagagaagcaagacaatggtttaacagagactcatggtcaggagaaatgtgtgtgtatgtgtgtatgtgtgtgtgtgtgtttctcaacaaacgagagagccttgattgcctttgtaggtctaagagaaagagctacaaaaggaaaaaatacataaaatatgagaggaatcaggtccagtgcagtggcctgtaatcccagcactttgggaggtcaaggcgggcagatcatctgagatcaggagtttgtgacccctgtccaacatggtgaaacctgtctctactaaaaatacaaaaattagccaggcatggtggcaggcgcctgcaatcccagctacttggaaggctgagacaggagaattgcttgatcctgggagatagaggttgcagtgagctgaaattgtgccactgcactccagcctaggcaacagagtgagactctgtctcaaaataaaataaaatatacaaggaatcattactcctactcagtgttccaaggtgctggaggaaagagggaaaaatagtatcatgaacacaggtacaaaatgtccaacaactggaaattaaatgaatcatattgtagaagaacatttattgccataaaattattaccatataccatatgttatattaacatatatagccttatatatgtgacattcatatggtattatattgctatataaatttttaaaattaaaatataaattgtgatgtattatttttaagttaaaaaaagttggtcacaaaacaagagagtaatctcttagctcttcttccctccttttccttcctgcctcctcaatcttttcctacctttttacctcctccagagtcttggctctacctaaagagagttgtgggaagttctttcttagtgttgtgaggtaggttagctttgtcaagtaaaaccaagctttctgtttatcttgctagacggtgatatttcatctaaacgattggtaccagatatgttttggaatcttcctatttaaagataataatacatattacttgatattaccagcagagtctgggaaaatacccagaatcaaacatattaatatatctattggaaaacatgggattattcaccttaaatagcttgaataaaaatgttatagccttatgttaattcaagttaggtcttaatgccaatgtgccagtgggttacaaaaatcctttattttcagaagattttggatttttrtattgaagataaggaattttggtataatattatatttataatttttcatagtctaactgtgatgatatattatgcttgaaaaatctcgattatcaccaaaagctacctccaaaccaagggaagagacacaaagagaggtaaaagtgaaataaacccctatcttgccacacagattttccaagcattttatagcaaatatgcataattttgtttatatcagtatgtcattgcaaacatcactcagagttttgcttttatagtttttctttgtttttsctaaagttattaattgccttatttttttaaatttcrttaattttctttgactttttgttaaaaccccatatcttccaacrgcatctcagaataatttttccacaatatcattttcataagtttatcttgagctaaaaataataacctttctctgcactggtttccctctagtcattctgcacagttgtcatattgagatttcctttactgtcatcctaggaatgctctcttagctatttccttgttttaggttctctgtttttctccttctacctttatttgctcctttgttctgttgtagtcaacgctgtctagtcacattgctctaatctgaactggctgctctccatgccttgtatacgataggagtcatcctggaatctccctttatcctcatggtgaagatttttctttaccacttccctgtgtggatttcctgttttctgttccccgtcttccttgttttgggcttgtgccctctttcttgttgttaacagtttccggaaagagagtgatcgggatgcaagatttttgagactcactggtctgaaactgcctttcctcttaaatttagttaagtatttccctgggcatggaattcaaaggtggttatgacttttcttcaggattgtgaatgtatttatatcctcccatcttacgttgctattgagaattctgaagttcttctgattcctgattctttgtatgtgtattcctcattccacaccttccccagaatgcatgcagaatttcttcctttctattttcttttctctttttctgaaactcttattattgggatcttctgcctcttggwttagggctctaattttccgacattttctctgctattttttactactttatttttctcctctactttctgagagatttcctcctcttgatcttccaaatcttgtactgaatcttttatttttgttaacatgttcttaatttccaagaactcttttttcttgtcttcggagtttcaacacttattgttgttttgtgcatgtattattttttcttctctctctgaggctatttaggaaattttttattgaagctcctcccccctgcttccttcaagttgcttttatctgcttttttatttgctttttcatgcaataagtttttctcacatgtctggtaactcttggggattaccaaaaactcatagaaaattctgaccatgtgagtaacacttgccaattttgagcttcatgatagaatgatctagctggaccttttgctgcggggaaatcggaggtaagtgtctttggagacttcctcttgggatggtcaggtctcccaggtttcaagattcttctaatttccttcttgaatcagttgcctaatttaggaaataaaaatacaggatctccaggtaaatttgaagttcagataaactttgttttttttgagagagtctctttctgttgccaaggctggagtgcagtggcatgatttccgctcactgcaacctctgcctcccgggttcaagcaattctcctgcctcagcctccygagtagctgggattacaggttcatgccaccactcccagctaattttttatatttttggtacagatggggtttccccatgttggccaggctggtctcgaactcctgacctcaagtgatccgcctgcctcggcctcccaaagtgctgggattacaggtgggagccactgctcccagcccagataaacattttttttaaaaagtgtaagtatgtcccattcaatatttaagacatacttatactaaaaaattatttgttgtgtatctgaacttcacatttaactgggagtcttgtcctgtgttttacctggcaaccctattcctgaaagataaatccttgctgacagcattagggatccaagtgaggaaaatggccttgcaaggtgtgggtgggggtggagggggaacgttttcaacattcagtgttatttattcaggtaatccccttcaactatgtctcttaaactttcatctaaagaccatccactttaccctctctggaaacattctccgttatttactggagtaggggaggatcagttatctggttttttggaggacttagtatccaaggcatccttcacaactttctgctcatttattttcctttgactgccacaactttactcctagctctaggtatagagcagtcccagtgattaatttgagtgctttgcagtgtagatagggattcttggctctttctactgctagtttaggacctggttttcttgggtctgctraatcaattactactttttgtatcaacatcctagtttttaaaactgtgttgtggtctatcctcctattttcctacctttgtgggttaaaaaaaatagtgttcttttgaaggattktaggaaataaaattgaagcatatgttcattctacctttacctgaaagttacttctatcccatcttaatacacttgcactgaagtgattactttccacctgcaaagtggaaacaataagaccagttagcggctgctgctttagtcaagcaagagatgaaggtgacttggaatatgctgtacagatggcattaaatgaatatggatctccttttggaaacttttcatctgcatggtgagatgactcacatacttagattttatattcaaatagctacgtactatagtggaagaaaaacttaatggagaagtgtttcagttcttgcgcagtatagaggatatgacttttccagattacaggggttgcctctaggtcaactctagggctcattacaactctgaagctcttttattgtgtgaaacaggcaataagatatgatttacacaggtgcctaaattaaacctttaaacacattttaaattcttgataattaaaatcattagtaacttgagaacaatgaagatatagctgttcatggctataggccaaggatctgattgcttttacakggctaatctttttgacagtgaattgcaggaggcactggggcttaaagccctttatttttattattagttgtattaattattcagtgataaactggatgactctaatgaagaagtaacattattttaccaaataaagtggcataggcatttttctagatcaagagagtatttcagttgactttctcatgttttttttttaagagcatctagcagtttatttaattattttattctattttttmtctttaaaatttatcctagctttattgtcattaacaaatgaaaattgtatatctttacagtgtatgatgtgacgttttgatatgtgtacacaccgtgaaatgattaaatcaagcaaattcacatatcccacatgactttcttatgacttactggttttcatgacttccctagatttgtaccctgttgaaatgtaaaacgactaatttaaacacttgcggtgactcagctgaaacagcttctaccaggtttgaaatgttctccctcagtggcactttcggaacccagtatgtctttcctgaggtgttgctgagtgaaaatcagcttgcacctggagaatttcaggtaagaatcttcgaatattgccaattagtttcatgtaagaggaagcactttttgatataaaaatctgctcaagtgcttacaaatatcataaaatttccatttagaaaggttaagattatccttggggatcatgaaggacattgagcaggctgcatttcttgtctggaaattcttaacataataattactgtgtccttcagaataaaaaaatawatatcttattttggggattatarggagtttaaagtcttccaagtagaaagaagattcaacgagagtagtttcagaaccagtgccattggagccccttaggaccactggggagtgatggcctagggaagttgaaaggagtccctctcgtcgagtgagtcaaggctctgtgtgatggtagaaggaaaagagacaaggaaaagctgaagaagagagaatttgacagtggcggatgttagcaaaaaagcaaaaactttttaaagttcagaaataatcccttgcttcacatgtgctctgcccagccacattctttcgctgacttcctgcaagttctcctcccactccccgttcctggtagaaaccactgctggggtgtgggaggacaatggaatggtgaggaggttgtggtgagcaagagacaggagatgacagatgctcagttcaaatccctgttagtcaattgcttcgggccattgtggggagtctttatcttgtctgagaggactaggtttctcttctgtatactgccaaatccactggtttgtgtttattaactcttacggcgcttccacaggtaagtaaattagaagacattgattaygggcatctcactaataaatgaatcagtgccagtttcatagctccaatttttcttgtacttggcaacatttcaaatttttctgatagaatggaatttggccagtatttttgtttcttcattctgttatagtaaattttaaaagtgatttatgggattgtaaaacttgaaggtagcctttgcctacttttttgttttaatcaggtgtcaactgacggacgcttgtttagtctgaagccaacatccggacctgtcttaacagtaactctgtttgggaggttgtatgagaaggactgggcatcaaatgcttcatcaggcctcacagcacaagcaagaataataatgctaatagttatagcacctattgtatgctcattaagttggyagaatattgactttttctcttttttatttgggataatttaaaaaatgatggatgagaaaagaaagattggtccgggttaatattatcctctagtataagtgaattactagtttctctttatttagacaaacacacacacaccagataatataaacttaataaattatctgttaatgtagattttatttaaaaaactatatttgaacattggtctttcttggacgtgagctaattatatcaaataagtatcacaaatcttttacgcagaagaaataaaaactacgggtagaaaacataagaactatcataaaatttacttacaaggaggctgctcttgttaccacttttattatattacgtatcacttattcagctctgctgaaaatttccaatgactttgtttgtttgctcttttwgttttttacctaaacaatacattttgattctcttgtgggttgataatgtctccccaaaatttacatgttgaagcacctcagaatgtgactgtatttggagacagggtctttaaagaggtaaaataaggtcattaggatagaccctaattcaatatgactgatgatcataaaagaagaggcgagtagggcacaacaggcacaaagggagaccataaggagacacagaggaaggacaactctttacaagctaagaagagagggcctcagaagaaaccaaccctgccaacaccttgatcttggacttccagcctccaaaactatgagaaataaatttctattgtttaagtcacccagtccatggtactttgttaggcagccctggcaaatgaatcaaagacccattcctgttcctctccccaccactactgttttctactgtaatctgaagcttcaacaaaaggcttacctggtaagaatattcagctggtctgggtcctcaagactccaatagacactcttaragaaggattgctgatggattgatagtgaaaccattagatcattgaattcctctggaattagaaaaccagagagtcccattttaagaaattagatatttaatatagcattgtgtgttctattttagtaacagcagaatctcttgacattacacaactcagtgaaacaacatcatttaagccaaaatatctcccaactgactgatagactctgagcactaatatcatagtgctgtgatgatggacaattacatagtaccgataacagccatgcactgtgcaaagcatgcccttctgcacaggagagcaaggcacttgcagtagtgatctatgccagcaaaacatcattttgagacaaacatttttgtggcagatgtttttcctaaaaagtactatatcatccaagaaatatttgagtaaaatcccttgttcttttgggtgacattaactgacatttgctttttttcaagacctaatagaaaataagaaagcccataatgtatttagaaacaggaatcctcagagcaattctctgtattctcatataatttcaatgtaaaacagaaaacatattgatgtgttggtgataggcttgaattattaaaaacttcaaaaacatcctaagtgtttcttttttgctcaacgttgtcaactatagtaggtctcccttgtggtgtaatgaattgcccccaaactattatcttaaaacaacaaacatttattatcttatagcatttctgagggtcaggatctgggactggcttagtggagttgttctggatcagggcctttggaaagttgtagttaacttgtccccagggctgccatcatctcaaggctcrggtggggctggagaaaatctgcttctcagctcactcacggcggttgccaggcctccattctttaggatgctagaaaaactttcataaaatgtcatctggcttctcctagagcaatgatactgagagagaaagcacatgagagaaagagcgagggaacttggatgtaagccacagtctttgaaaacctaatcacagaagtgacatctcttcttccacatgatgttggtcacatggaccaacaatggcacaacgtggacagaatcaaacagagttgagaatatcaggaggtggggcttcatgggggccattttggatgctatcatagtgaatatatgtatttatatttatatctgtatatattgcaatgtaatttaaaaaataggattgttttccttttctttttgctatatgtgatatgtatttcaaaatacactcccaatagttacgtctgaaaagcactacactaaaaaactttctatacattgaataattaaattaaataatctaataatctctacttttggtccatagtaaatttaagttaactgtttgccttaactacagtttgtggcaaaaccatctccttttaatatacacaagggacttttttttttttttttgagacggagttttgctcttgttgcccaggctggaatgcgatggtgtgatctcagctcactgcaacctctgtctcctgggtttaagcgattctcctgccagagcctcctgtgtagctgggattacaggctgggattacaggcatgcgccaccatgcctgcctaattttgtatttttagtagagatggggtttctccatgttggtcaggttggtctcgaaacccgagctcaggtgatccacccgtctaggcctcccaaagtgctgggattacaggcgtgagccaccatgcccggcccgtgggacttttgcattcatttttcagaagcttactttgtaggggaacatacattaaaaggtaacaaaataaacagcataagttccagaattattaattcatgaagtgcaaccactaggaaaaggggtcttaaaaacatcaccctctttactggattctttgaagaaaccaagatttttttcctaataatctgttttatacacaatatataccaaaaatatataaatatataagtatataacaaaagtgaaagaaactgactcttaatcacaatgttctgaatagcaagaggaatactaaaaaagtcaactagaaagtcatgtcaacgtcaaaatctgttctgaaacacatcactttgattttatactgaaagccgatacctcgaatttcctctgcttcgctgtcctgtggttgtactgggcatgttccaaatgtatcacttttatttttatttcaataatttcaagtgttattttagattcaggaggcccatgtgcaggtttgttacatgggtatattcagtaatgctgaggtttggggtacaaatgatcctgtcacccaggtgataagcataatacccaaaaggtagttttcagccctttccccctccctgtttcccagctgtagtagccgctagtgtctgttgttaccatctttatatctatgtgtaccaaatgtttagcttccatttaaaagtgagaatatgcagtatttggttttctgttcctgccttaacttgcttaggataatggcctccagctgcatccatgttgctgcaaaagacatgattttgttcttttttatggctctgtggtattctatggtgtatatgtaccatatgttctttatctaacccatcactgatgggcaactgtgttgattccatgtctttgctattgtgaatagtgctatcatgaacatacgagcgcatgtgtcttttaacaatttcttctcctttgggtatatacttagtaatgggattgctgggtcaaatggtagttctgttttgagttctttgagaaatctccaaactgctttccacagtggctgaactaatttacattcccacaccaacagtacagtgttcccttttctccacagccccaccagcagctgttatttttgactttttaaataatagctattctgactggtatgagattgtatctcattgtggttttgatttgcatttctctgataatgagtgatgttgagcatttattcatatctttcttggctgcttggatgtcttcttttgagaagtatctgttcatgtcctttgcccagttttaatggagtttttttttcttgttgattcaagttccttatacatcctggatataagcctttattagacctttggtcagatgcagtttgcaagtgttgtttcccattctgtaggttgtctgtttactctgttgatagtttcttttgctgtgcaaaagctcattagtttaattaggttccacttgtcagttttcttttttgtcgcaattgcttttgaggtcttagccataaattctttcctaaggctgatgcctagaatggcatttcctacattttcatctagattcttgtagttcccaggtcttatgtttaaatctttaatccatcttatcaaaacaatctacagattagcactattcctaccaaactaccaaagtcatttttcacagaattagaaaaattattttaaaattcatatgaaccagaaaagaatcccaagagccaaagcaatcataagcaaaaaacaaaacaaacaaacaaataaacaaaaacaaaggcagcggcatcacattatccaacttcaaactacagtaagtccacagtaaccaaaacatcatggtactgatacaaaaacagacacacagaccaatggaacagaatagagaactcagaaataaagcttcacactgatatagtttgtatatttgtccccacccaaatctcatgttgaattgtaatacccgatgctggaggtgggggtctggtgggaggcatctgggtcatggggatgcggctttcacagcttggtgctgcttggcaataatgagttctcacaagatgtggtcatttaaaagtgtgtgacagtccccctactctccctcgctcctgcttttgccatgtgaagcacctgctctttcttcgtcttctgccatgagtaaaagcttcctgaggcctccccagaagcagatgctggcactgtgcttcctgcacagtctgcagaaccatgagccaataaaacctcttttcatataaattacccagtctctggcatttctttatagtaatgcaagaacagtgtaatacacacacctacaaccatatgattttttaccaagtagacaaaaataagcaatagggaaaggactctccattcagtaaatggtgctgggataactggctagccatatgcagaagaatgaaactggacccctacctttcaccataattttggtttttgaaaagagagtaaaattcttagatgaggagagtatcctacacttacaataatacttaggcagcatgctctagtgtgcaatggaattattgttttaagtacagaaaatgcaaaaacaaatctatgttctaataatattcttacctatttggggttcatgtaatttaaatgaaacctagtagataaaaatgctatgtaaatatgggacctagtaaatctaaatatctgtagcacttcaaatatgatgataatgataaaccaatcttaaaatatgaggaaagcacctataaattaatagtgctgcattatagtgctgttactgtgtataccatttttatcatggcaacttgtagattaaacataaacaaaagcttgtacccttcaaaattgagatctattttttcttctttttttttttttttttttttttttttgagacggagtctcgctctgtctccgaggctggagtgcaatggcatggtcttggctcactgcaacctccacctcctgggttcaagtgagactcctgcctcagcctctcgagtagctgggactacaggcatgtgccactacacctggctaattttttgtatttttagtagagacggggtttcaccatgctggccaggatggtctcgatctcctgaccttgtgatccgcgtgcctcggcctcccaaagtgttgggattacaggagtgagccaccgtgcccagcagagatctactatttatccagagttcttagtgaacccaaggagaaggtcatggaaaagtaacaagatctaacgtgaaacaatgatgagagggaaggagtaaagaaaaggggaggggaggagaactaatgagagttctccaaaatacaataaaaacctggcactttcaaaaactgaatatgaagtttcttaaattggcaaggcagagtaacgtgcacacacagatgtacatgtactgatggccacacacacaggccaaagcatatttggggacccacatttggacacagttgcagactaaaacgtgagtcagctgtgtttctacttctagaaaagtgctatgacagaggccgggcgcagtggctcacgcctgtaatcccaacactttgggaggctgaggcgggcggatcacgaggtcaggaaatcgagaccatcctggctaacacggtgaaaccccgtctctactaaaaatataaaaaaattagccgggcgtggtggcgggcgcctgtagtcccatctactcgagaggctgaggcaggagaatggcgtgaacccgggaggcggagggagcctccgtctaaaaaaaaaaaaaaaaagtttgtttgggtgtggtgctattgacacaggaaacagaccatatattccttcaaaagccagccttcaaaaatgccctcttacagggaaaagcaactggcttgtggtagagggctgacttccgcttaacagtgatgtccaggtgataatctcattctcctccagcctccaggcgtctcaggagtatctgtctgttacactgtttttttctattcatagctcagtacagttgacacttgagcaatgcaggttggaactgcacacatccacttatatgtagattttttcaataaatatattgaaaaatattttggagatttgtgacaatttgaaaaatcctgcggacaaaccacatagcttagaaatattgaaaaaattaagaaaaagataagtaatgaatgcatacaatatatgtagaaactaatttatcattgattgccataaaacatatgcaactctattatataaagtcaaaatttatcataatacacatgcacttacagaccacacataatcccatttgcaatgaagacaaatgtaaacatatgtaaagatgcagtattaaatcattaccacataaaatttattgtagtattacatattgtactactgtaataactttattgccccttcctgttgctactgtggtgaactcaagtgttgcaagactctgcttcatgccctgtggcactaatcatctttgcatgagcagttcctcttcagcaaattggggattgcagcaaaaagtgattttggggttcttgtgtatttttcattgtgtttagtgcaataccacaaaccttgaataacaccatgggacccacaggaagtgccactagtgatggtggaaatgcttccaagaagcagagaaaagtcacattacaagaaaaagttgaattgcctgatatggaccatagattgtggtctacagctgcaggtgcccctatttcagacagacaattgtattttctattttctatgggtttcttaataccatttttaaaacttttattgtaagaatacagcaaataatacataatacatatacaatatgtgttaatcacttatgttattggtaaggcttctggtcaacagtaggctattcgtagttaaatctgggaggagtcaaaaattacatttggatttttcaccgtatggcagatgggcacccctaacacccacattattcaagagtcaactgtatttgtcaaatatccatagccaggcatgaagattttagagctttcctaatcctggactgtggtttcaatttaaacttagagaatttgggcttactagagtcattcattttgggggcacagatgctagagagaggaagatttctctgctctggctcgtaccccactaaaacttcaataattgcaggatcaacaggacactgtgtttggtggtttgcagacaagagtacactggactgatgacgctct

SEQ ID NO: 94485 - DNA, 16069 bp, Homo sapiens
  misc_feature (1)...(16069): n = A,T,C or G
tgctgctgctcattccacactgttgagaccttgtggtctcgatgctgctggcctccctccgtccctctgtccacttgtgggtcctggggtcgtcttagcagagccaccgccaaggtttgcactcagggaggggctgatggagggctgggcgccatggggtcagggaggccccagggacccatgggcagagctggggagccaggaggatgggtctgcctgctctgggggtgcaggctctgcagacaccccaattgctgctctgttgctgtgcctagtctagtgtcccccaaagcatcggggggccacgcaagtgtgggtgtgtgagtgtgcgtatgtggggaccccccagggcatggtggggtctgaggcgtgtgttcccatttagggctgaatgaagccatgacttggaaaggtggtggggggtggatggcggctgtgactcagggcccagggatcacatgggggtcactgctgccatcagcagtcaggcagggagaacagaaatgcaaaaatacagatgtctatttttctaaactggggggtggaggggtgcctcctgacagcttccaaagagctgactgtggagggcccacagtgtatcccacccctgcccgagagtctctctcctttgggacccccgggttcccagagctccgaggaaactgatccttcatgtttcaatagctgttgttgtttttctctttgggccgggccgggccggggaagggccgagcaggctccaggaggcctccagagtcagctggaccttgctgtgtcgcccgcaggcagccctgcagacaccggtgaggtgggatgatttcaggaggtcccagcccgggactgcccgcccctctgccctgggaaccagtccaaggggctgtcagttgaatttgcctttttgttgttgttgttgtttttgttgtttatttgttctccttttaaggaattatgaagctaagaaaagttttgtgttttgggggttggtggacaaagttctagctgattaaatatggtctaacttattgatactatttttttttcttttaatgttgtactgtggagaaaaactattttgagccatggggttggtgtttacaagaactttccacttttgccaaaatgttacaattgaaaggcatctatgcgtcttcagtttcctgatattttcttaaaagatctagtgtcctttttgtacactaaacaggtgaatgctgacttttttcattctccaataaatttcactgaactgaacctggcagcccaggctgcctggctggtgtgtgtggtgtgtgggtgttggtgtatctgtgtgtgtggtgtatggtgtgtatgtgtgtgtggtgnnnnnnnnnnnnnnnnnnnnccccccagcactccgatctccctccgttccacctcatgcgccgactgccgtacagggacaaacccggtccagactcccttctctccgcgtgcctcatgactgtgtcggcgtcgcccctcagattccggtctgagcttcggggtaacgtgggctcttcgtgctctttcagggcccgttgcggttcatgcaatgcttcttcctctgccgttcgagctgtgtaggctctgtcaaccgtcgctctgggcctacgttctgccgccactggtgcgctttcgggtcgtgccctcctcgtgtgccactcggccgtgtgcgctctgttcggctgtctgaagtcagtgtctggtgtctctgctgcggcatttggtcgtgttgggctctttggtctggctgcggtgtgtgttgcggtctggctgtggtgtgattgtcggtgtgggctttgcgtagctgtgtcgtgcgtgtgtaggtgtaagcagtgtgcggtgtgtgttccggtgtggggtgtgtggtgtgtgttgggcatgtgtgtggtgagcatgtggtgtttgttggcatgtggtatgtgttgggatgtgggtgtgtgttggggtgtggtgtgtggatgtggtgtatctgggtgtgtggtatgagggtgtggtgtgtgttagggtgtgtggtgtggggtgtgtgtggtgtgttggggatgtgttgagggtgggtgtgtgttggggtgtgtgggtgtggtgtgtgttggggtgtgttggtgtgggtgtggtgtgtgttggtgtgtgttgaccggatgtgtggtgtgtgttggggtgtgagggtgtggtgtgtgttgggtggtgtgtggtgtgtgttggggtgtgtaggtgtgtgtgtggtgtgagggtgtggtgtgtgttgggggtgtgtgtgttgggtgtgtggtgtgtgttggggtgtgggtgtgtgtgtagtgtgtgggtgtgtcacagcctggtttctgtggtggccgtccctgtcctgtggttgggggtgggctggcatcaggaggtgatgtgacctgggggcgccataatgatgagaaagggttgttcaggggctctggctgggaccagataagaaggcagagtttgcagcctacctgagccgttgcctgagaaaggaccaaatcagagggccctgtaggtgacggggagcgcgggggtgggggcaggctgggtcagggcggagggatagggagccatagcaggtgtgtgagcacagcagtaccctctggtgtggatagggtgggctgaacccagcattgggattccttggccccctgtggcaccaaaggctacaggagtggggctgggggtgggggaaaccagctgtgactgtctccctctgatgaaagcagcagcaggtaacggtaatattacctgttcttcccacactggggcaggggcatcccctgtgccactagtggggatggggaaaaggcctgacgggagcggcggtggtgcaggtggaacgagccaggggccatggagaacataacactcaacctgccagccaaggacaagaaggggtgcatttagtaagcgataacaccgaagaataggaccgtgggcaaaggtcctgggcctgcagctgtggggggggcctggcctccctgcccgtccgtggccttggcccaagttctaaggccacccaggaatctgaggggcgcgggaggggaagtcatgcagcccagtggggcagcgtgtaccctgctcccagcatagcctggccacgctgttctcccaggataacatctctgtcccaacatcccagggccaacaccaacctcctgcagctcacggtcctgcctcccccggccctccaacgccagccctaagccaactgcccagcaatactctggccatcacccccgcagcctgcagaggccacagtcagtcccctgaccttcctgagccatggatgccatcagtctagtgccccggatattcaggagagccttcccaccctcatgacctgggcaccctggtagagaggggctcagagctgttaaaccctctcctgccacctgccaggggccccaattgtcctctttcaacgggcacccctgttcctgcagccccctcctgtaccaagctccacctgggctctgcaacacagcagtgactcagcctcatccctgccttcagggagcccacactttgctggggaataacagtgcatctcaccaccgacttcagcacacccaggcctgactgtaggggccaaaccccctccttcggccttgtcaactgctgggagtggaagcagcccagcctctatgccgattccctccagctgccctgtgccagctcccatcctccggcaccctctacaggtggccctgtgaacacaggctccccggggctgggtcttgggaccttcctcatgtctctcaactacacaggttcctgaatcacgtgtcgcctcgaggcacaaactccccgattctctgatcctccagtacctacaggatgtccaacagttccattcccagagatggtatcggactccacaagttatgggggtcagtcccacagggctgcacctgtgtcagatgccacctatacttctggcaagcaggctaataaattgcgagttcccatgaccccacttcaggtttgataattgctggaacagctcacagaactccggaaaatgctcacagccaaatggaggaggcgcacagggcaaggtatgggcgggccgtgaagcttccatgccttttccaggcatgccaccctcccagcccctccatattttcccctaaaccccatttttttttttgagacagggtattactctgttgcccaggctggagtgcagtggtacaatcatggctcactgcagcctacacctcctgagcttaggtgatcctcccacctcagcctcccacgcagctggactacaggtgtgcgccaccaagcccggctattttttgtttgtttgtttgtattgagacggggtttccccgtgttgcccaggctggtctcaaactcctgggctcaagcgatgcgcccgctttgacctcccaaagtgctaggattacaggcatgagccaccgtgcctggctgactgcctatttttcggcttaggttctatgaagaatgtgtatcaatgtgttgaaacactgtagatcttaaagggagcagactgggtgggggaggggggccagcctgcccagacttcctagactctgggtagcattccttcctccagggtatgggcaggaccctcccggaatgagggtcttcaagggagcaggcagagagtgacctttgccggctttgtggctttttttttttttttaaggggagaagggctccagtgtctctgacctgccttggggaagaggaattctggtttctatggtttccaggggagaaaggggctagaggcaggagggcaggagaaggtcggagagactcgattctgagctttccgatgccctgctcaaagcgcggggcaggccaaggccccataacttgaggctgaggggagtttctgtgttctgagccccaactgtctcatttgcatatatgtgattgattaaatcgttggccactggtgattgagctcaatgtctaaccaagaaccaggaacaaacaccaaatactctttcacactccctatccccagccctcagggtctgcccaagaccccaaactgcctcccacgtagccaatttttcatctgccctgtctgggtggctcaggtggcttggcctgtagttttctttcagtgaactcctcttcatgtctcaaaacccttgccagcagccccctcatctggggagcctgtcttgcaggggccctgcctgtgagttcccacccactggggcgggggtgtcccagtccacttccaactccctcagactggggccccttcagggtgaggcctggacccagagtcttaagccctcatcctccaaggtcaggccctgtctcttgcaaacgttcccaactatccaccttttgggccagctccagtggtggaaactttccggcctccaggcgcttgttttggaaagttcctgggggagctgccccggcctgcccgctgggttcccacgctcccttatcagcgcgcatgaggggggcgccctgcagtgcaggcctcattcctcccctgcctcggccctgcccgcctgtgcgtcccctcccctttccagcgaacagcctcccgctccggcccactcctgccaagccctcctgctgcaggtggggaaacaggccaaacaggccccatccttgtgagccccgtggggacagagtgactttgtcccccgagatggatgggggcggacatggggagccaggggatgggactgcctggtaggtgctgctgcccacgaagggggagtaggtggcagtgtggctccgaggagattctggctttggagttctggtcctctgcctgtttcccctgcagtgtctctgacccagaccccctacctacccccccggaggcccagcttccctgcccagctccaccccctggcttgtggctgggctcatgtgtagcctcattgtcctcttgtaaaggggggataggcagccatgagcccctgggggctgcggagcgagcgaggtgaacctatacgcgccgcgctcgtggacgcctggccacttccgccaggcggggacccgatggccacggtggctctgggttgtcgggcctcgaaccgggtctccagacgttgggcccctccctcccagcgcgggagaggcggggaagggggcggggcgggggaggggccgcagcgcttttctccggaggtcgcgcgcccgagagcccgcgctgtccgccgccgctgcctgagtcgactctgcgccggtgagtgcggttcggggcrgggacggcctccgtggggacccaggctggcttggccccggccgcttagagtccccgctgaccccctgctcaccccgggcccccagcccgccgcgatggaggccgccgcccagttcttcgtcgagagcccggacgtggtctacggccccgaggccatcgaggcgcaatacgagtaccggacgacgcgcgtcagccgcgagggtggcgttctcaaggtggaccagggggctgaggaaggaggcgtgctggggagagcggggcggctcggggagaagggcacgggacccgggattcactgcgcggcctgtcttcaggtgcaccccacgtccacgcgcttcaccttccggaccgcccggcaggtgccccggctcggggtcatgcttgtcggctggggcgggaacaacggctccacactcaccgccgcggtgctggccaatcgactgcgtttgtcctggcccacgcgcagcggccgcaaggtgggggcgggaggggcgtggtgggtagggaggcttggtgggagtccttgcgggcgggggcgggagcctgcagggggcggggctctgcgggaccaggggggctgtagggggtggggttccgcggggcgaggggctgcaggggcgagggacctgcccgggtctggaggcctgtagtgggcgagggacctgcagggggcgaagctctgtggggcgggagggcttgcagggggcggggcctggctgcaggcggaccccgtggaagggtttcgcgaggtagcggggactcctcgggagtcttacaggggcggagcttaaggtgccggaggtctcaggggaggggcctgggggcagcggcttccgtcctggctgtgagcctggaactgaaaaatgcccgaaagtggggcggggcttgagagtctaggtggggcccaggccgggtcgcggccctttcaccactcccacccgtcacctcgccgtgtctgctgacccccaggaggccaactactacggctcgctgactcaggcgggcaccgtgagcctgggcctggacgccgagggccaggaggtgttcgtacccttcagcgcggtgctgcccatggtggcgcccaacgacctcgtgttcgatggtgggcggagccctgggccggggtggggcgggatgggagatggggtctggaggggcccaggatccgggcagggccgagtgtgagggtccccccaggctgggacatctcgtcgctgaacctggccgaggcgatgcggcgcgcgaaggtgctggactgggggctgcaggagcaactgtggccgcacatggaggccctgcggccccggccttctgtttacatccccgaattcatcgcggccaaccagagcgcgcgcgcggacaacctcatcccaggctcgcgtgcgcagcaggtgctgtcccatcccgcatcccttgcttcctgccacctgttcttcgccacttggttccctctttttgccccaccccgcgaatccaggcctcacttgacacccggggaactgagtagcccaggcctctgtgagtccgagagtatgtacaaccaacttccctacaccctctccatcctccccacaccctcwccatccaacccacagctggagcagatccgcagggacatccragacttccggtctagcgcggggctggacaaagtcatagtgctgtggacggcgaayacggagcgcttctgtgaggtgattccaggcctcaacgacacagccgagaacctgctgcgcaccattgaggtgggcgaacgcccgggtggagcgggtcaggcagggccagtcacagacacagctctgtgctgactgcccgccttgcccacagctcggtctggaggtgtcgccctccacgctcttcgccgtggccagcatcctggagggctgtgccttcctcaatgggtctccgcagaacaccctggtgcccggagctcttgagctcgcgtggcagcaccgggtttttgtgggcggagatgacttcaagtcaggccagaccaaagtcaagtccgtgcttgtggacttcctcattggctccggcctcaaggtgcgtgggcctagggagctgcygagtgcaggaagggggcctgggccgcgagcacctggcttgtggggccgcagggcctgcagctgctggggcttcccttgtacccacagaccatgtccatcgtgagttacaaccacctgggcaacaacgatggggagaacctrtcggcgccattgcagttccgctctaaggaggtgtccaagagcaacgtggtggacgacatggtgcagagcaacccagtgctctatacgcccggcgaagagcctgaccactgcgtgcgtggggcgcgggcgcgggcgcggggttgcccggcgaggggtgscagggacccgggcaaactcctgctgcactccaggtggtcatcaagtatgtgccgtacgtgggtgacagcaagcgcgcgctggatgagtatacctcggagctgatgctgggcggaaccaacacactggtgctgcacaacacgtgtgaggtgcggcgcggcttcaggggctgctatgggaggcagggcttggccaccgcccccatctcctgacccacccgccccgcaggactcgctgctggccgcacccatcatgctggacctagcgctgctgaccgagctgtgccagcgcgtgagcttctgcactgacatggaccccgagccgcagaccttccaccccgtgctgtccctgctcagcttcctcttcaaggcgccactagtgccgcccggcagcccggtggtcaatgcgcttttccgccagcgcagctgcatcgagaacatcctcaggtgcaccccagcctccaggttcccgcccggggcccagatacccccctggctaagctatgcacagggcttggggggctgtaggtggcagggataccccccctttctccctgtgggtgtctggctctgctaagctgtgtgacctctccagggcctgcgtggggctcccgccacagaaccacatgctcctggaacacaaaatggagcgcccagggcccagcctcaagcgagttggacccgtggctgccacctaccctatgttgaacaagaaaggaccggtacccgctgccacmaatggctgcaccggtgatgccaatgggcatytgcaagaggagcccccaatgcccmccacctgaggccccggtcacacagtttytcggctcttcctccccgctgccccccacgaccctaccttgaaggcccccacaaataaaggcgctgccactcagccctccttccacctggggttcttggggcctgtgacctgactctgcctccctctacttccccgactcttgagcgcccagcttcagtcccaycccctctgcccatggtcatcaccccaactcccagggagagcccagaacctggagcctcgctctgcccccagttctcaaaggtggggctagatgggggcggggacggaacaagaccacagggtggagagtgtggtggcagaaggccaaagagggaatctgagacaagctaccaaaaaccaaaaccagcttccatttattkatgggccccaccccctgacgtcctggggagaggggccccccaaagagcctttctctctgggacaaaatacaaatggcagraagggtccatacagaaaagaacgtctctgaggtccttgcgtttttaataaaatggtaagagtctttcgtgtggggcctcccagctgggcaagccttgattggccaggagtccaggtgcccgaggtgtgacctcagcccctcgccctgagcaggggcgctgggcagaagcctaggcccgcagagaggcccggggctgccgccccatcacacgctcatggtcatccctggcgagtactgcggagagaggagggggcagcgcgcaggggccgagttcagctccggaagaggctgggacccgcccccagggacaatgggggacagggcagggctgggtcctgggcagacatggggtggggacaggagggaacgggggaggggcgatgcatgggaaggccgccctggggcgcgggtcccggggtgggggcggatgggatcgggacggtgaaataggagcgggaggtggtggggggtggggagaggttgaggagagggaaaggatgccgcggccgcccccccacctggcccgccgcggtcacggtcttgctctggccccccggccgccccgccggggcctgcccgccaggcccctccggcccgacgccgccgcggggggggagtcgacgcagtcgcttacgctttcgctcgggaacgggtgcaggaaggtcccggcggccgccatctcgccgtcgtcccgcggggtgcccggggcgttgctcaggccggccacggcgccgggggaactctgggggcggccgcsgtcagckcgcaactccccgccccgccccctccccgccrccccccccggatcccacccccggcaagagcgcagcctccttaccttcggcaacccgtccatgtcgcccgagcctacagacacggacagacacgggcaccggctcagacgtgctggcgccatgcccctcggcctccaggggccaacgaccctcgcaagctgcccccgccgacgcgcccccgccccgcacagcccgccaggaaccccgggactgaggccaggtggagggttgggcctgggggggaggggcggtcagtgcatcctctggtttggtcgctggatccccctccagctcggggcagcccctgtcactgagcggcccccggggggctcaggacgccactagacgcctccacccggcaggcgggctgacggcagggggaagcagccagggagcgcacgggcccggaaggcaacgtgggcgggagcagggacgcccactcacccagggatccgttcacgtggtgaggctccatcgcgctcatggcggccatggggccctccgggccagggccgagcgggaactgcgggcatggggacagcgtgggactcgggccacccattccccaagtggggtcaccgcctcgagaagcacccctgcaagcccccactcacattagccctgccggcgccctgcccgatggggttcatgatagtgtacatgttttcgctggagttggtggaatctgggggagaccagaagggtgccaggtgtgacggggtttcccccaaacacacccaccctagcacacccccacctcttactaggccatacctccagggctaggcatgatgggtgttccagggggcccacctcctcctgggggtccctgcacacaagagacaggaaccgtgagaaatggcccctcatctgccatcccacaacccctgcccaggggtgacccagctttgctcagacttacggtgtagctgccgggggatgaggaggagtaggggatctggggacaagggcagctgtgagcagtcagccaggcggctcacccagtgtccctcccaccccaccccaagcctgcccacccagccataggctcaccgagtttccactggggctggcccacgggccacgaactcctgggcccctggaagagaccgcggatgacagactctggggctagtccatgtggatcacagccctcaccacacaccccccacaccctgctccactgtatccccagaccgaccacagagcagcagatgttgctggaaaagtggccaccatgagctgccaggttccaatcccaacccatcactggccccaggagactaattgctacttcaagtctcagtttcccctcaacggtggccatgaaataaacaatatccaaggctgtcctgaggattcaggacctgccccagctgacccagccatgaagctggtggtggcctgcgaactgcacactcctaggatcccccagggtcttacatgttcatggcaggcaggcctgggccggcgagggagttgggtgggggtcgcatgccacctccatagctctgcggaggcaaaggggctgtgaggggtagaccggggacagcccgaaggccccacccaccagggctccactcttacctggggccccacgctggccatgccacgaggaggcgtcaccctctgcattgggccgcccatgctcggatgccctggggtggggcagaaggaaggggacttggacctggaccattccccagtgtggacagtggggaggcagcaaggtctgggctctgagagctggaattctgattgatggcrggataggggctggagcttccctactcaccctgggctcgtggggagggctccatggcgccagggaggaggggctgggagccagggaggcctgcgggaggctgcggagggggtgcggcggcactgagtgtggggtgctccctccccggcccagctcctgcccgccctcccctcatccctttctcacctgactcggcatccgcagggtgggccgggggccccctgggaagcgcggtgacatgaagggctggaagaggtgggcggggatcagcaccttcccccaccctctggtccccaaagctaccccattcctgctatgctggggcccccgacctggggagccccctcctccagaaccagccagcaaagcccggccagctggcaccagccaggacctcatggcttgagggtgggagggggcggcgctgggggaggggatgtgtgtgtgtgaggggcaggcaccacagctccttacctgaccgtgaggccccatcatgggggcgttggggttgtggggggacggctgggagccgggggggccctaggaggacagaaccaggtgggtgggggggagtgaggccctactgggtttggctgaggaggggaggggctccatggaggcagaggggtgggccagcctgtgggacagggaccttgtgggaaggcttgagggcaggactcaggcaccagtggtcaccaggaccactgtggctactgcatccccaagcaccctgtgcgcacacatgtgcaggccaagtgcacagacacccaccctccactgcactcgggccctccctcgctggcccctgaaaggcccacctgggcacacctgcggcacagaggaccctcccacccaactccagcctgccggcctcatgacctctgcccacgtgggaccccccccaccctcaaacgcatattcagccagagttgggggccagtggactccagccggggccatacctggaagaagccagccgccatggagcctgcggccattgtgtcacctggggccatactccccataacggggctgggggcggctgcagcactctgtaagggtgcgggaaacccagagggccaggtcaggacacctggacacttcctacctggggtgtgccccctcctctctgcaggtggccggccccatgggacagcgagctggcattggtcagtgagcacactggggttgtcggcctgaggatctgtgggtctgaagaccctgtaggacgcaggatccagtgtcgccctcgtttctcacagacctgctccccactccagacccatctcaactggccctgcatcgtcctggctggcagggcagctcagctgggtccccaactctactcaggaccccccaaataaacatacacacaaatataccggcagtttcaagagcctccctgaaggctccaccttagaacaagtgtagacccctgccccaccccaccctgcccttcgtccaggagggagggtgaaaagcaggattctggggtggggtccccatcccccagcctctctcagatggagaaggcgacaagacagggtgctggagagggggcttcctgtatctgccagaaattgtggtggcagcccagacctggccggggaccaagttctagacctgtctgctatggggcctacagggtctggcagggggaaggtggggagggggatgtgaggtgggaagggaggcccagtctatgagggcagaggaacacgtctggggacagggaggggagaacttctctcctggcccctgtctgtatggtccaggccaagccccaaaccccaaaaagaaggtgatgggctctctctggggtcggcccaagccagcacacagggacactcaggtgtttgtggcatgaactacagccacttgggctcagagaggttgagcactctgcctacagtcacacagcgtttcctgccctcagggactgctgcaaggggccccctgcctagaggagggctcctggagaaatcctccctccccctgtggggctgcgggttgaccccttcctgccccttctctgaggttagcctcaagcctcccgccarggtcctaaactgggggaggggctggagccgggagccccctaagcccaccgtgacggcgagcactcccaaggcccaaaacaaatccttcgaaagccctcgtgccctactcctgtgccactttctcagttccaaacttccaggtcccctctgggctctggcccccaccccgccccctcccgcaaacacaatggcctggagcagctgccctcccaggcggcccctccggtccactccccgagggtggggagggggcacctttgagccctgtgtctgtccaccccgcagggagggcaatcccctcacgggccacagcgggtgcctgagcgtttcctggtcggggacgctccaccgcaccccccccccgccccctgcgacccgcagcttcccaactctaggccctgagcagttaatcccgggcggcgcgccctccccggcggttggcccgggccagaccccctacgtcaatcatccctgaagaggagccggcccggcccgcgttgccatggcgatgggctgggcgctccggcgtttcctggagacgccaaggtcggcagggagccggggaggggcgaacagagccccccccgcccccctcccccgcctcggagggcgagagaggaaggggccgcctccgtgcaggctcggcgggcaaggcgcccccagttagagcgagagcaacggaggcgacggcccggcatgacgagtccccgcggggattcggtcaccccagggcttgggcggcctccgccctgggccctgcggtctacgctctgcgccggcgctgccatggtaaccgctgcgcgcctgggaagcgcgttcacgccgactctccagctccgccctcctggcccggcggggggcgcccagagaggatgctagacccagacggcagggatgggggcagagtcgcccaagtccacagctccagacacccccggggccccagatctagcgggactaggacaaggggaccacacacgagtagtgggacaccatgggggtgaacagcagtgacgccaggagggcttcagcctgcccagctctcatgcagagtgctggaggcatcttcagagacatgggcgccccacccctcgggccgcctctgccttgctggggcctgcgctctggcgcacagggggtagggggtgggcgggactggcgccccccagacgcccaccggcagagccggcacctccccctcagacccaacagagggggccaggtggtccagcgcagaggatgaagggaagggctgccatctgctgccccatgacaacaggaggctgccatcccctagtgttagccaggcagcctccactccaggccggcctctgaccttttccaacccagagggaaaatgacagcagagagggagtgggcagctccagatacctggcaaggtcagaaagtgtcccagtgcctggcccatcaggcaccccgacctgtgctccccgctcagaggagcagcagtgacccccaatgcacacacggcagaggagggggaaggcagtgagcttcccccatctccacgcaggctcacatgagatgcggggaaatggcaccccccagtgccccaatgggggtgggagggctgtggggaccctcagaa

SEQ ID NO: 94486 - DNA, 126888 bp, Homo sapiens
ctgatttatttgcatgcaggaaatttcaacaccggatgcccaattcttttcctttggttcctaacaggtattaagcatcgatgtgactgacagaaacatcagcctacataattttacttcattgacgtggataagcactctgtgaatttttacagcaagattctaactaactatgaatgactttgaaactacttatacttcatactcataaaaattattgtgtgttgctaatttgttcatacccactattggtgaaatatttctgttaattttgttatatgttttttgtgtgaaccctaaaggttaaaccttagccctgtgggataggcagttagggaggtgtggaaaatctatgcattaccttaatgtctctgtgtggttagtatggtagtgactgttcatcatatgacatttactgaagatgaactgggtccatgatgaagtgtgtgtatgtccacgtttgtaatcatagaatggaccccattcttttgttaaatacacaagagaaagctttctgtgacagttccaggtcttgaagctaatcagcatctcaagaaagtatccagaaagaacatctgctagttggttataggcggtgggaggaataatatacctaattggttataggtggggggagcatgataagcaaagaaaaggcaaacacaaggaaagatcagatgaaacagaagatgatagtaaaagtgatcctaagtaagaacataatgtaaaattgtcagcagcctcatggggaggaaaaaggaagagtcaactcacttgaagaagagggtcttgagaaatccttagcataaagggctactggtgagattgagatctgagcaggcaaagctcaaaagagagtttggaggttaaaaataatttatttttgcagtagtgtgctttgaaatgtgtaaatcttatttctaatgtatacaaccacatttcacataaaaatatgcaatttatatgccagataaaaataaaacaagtgaatttgcaagtgattttgaattttgtgctattttgaccatgagtaatctctgtttggggttaaggttcttgtttagcaaactcttatgaatttgtctttctggttctctttggcatcacagaacctacagccaaatccaccaataggatgataacctttataattatcctttttcttacatctctgcaaggagtcttttataagatgtgggtttgtggaagggtctattgattactattttaatcatcatagcagttgctatatttaggaaaataccaactccagtaaaaataggagttgcaaccttcttgcttaaaattctatagggttaaaatgtgagataaggaaattatatattaatgttcaacaggaatattaacttttgatgttacctgaaaatgagttgaaaatgaatgtgtgtggaatgaatgaacctacttctctgtgttttcttcttttcttataaccaggaagccattcattctccctgcacactcatgtgtcagcacctgcataaggctagagacaaacaatattgttaaatcatctaatgatcacaataaggggcatttggatgagggcctgagctaactaggaaactggtgaaatatggaaaagcagccatgggaatcctttgatcaaaaaggtgggaaacttgtcagctttcctctaacaaactcaggaaggccacaaagatgaaaacgttatttacttgatatttaaaaaatatttaatgttaccatcaaggatatgttggtggaatttggctctggctgccacaaaatgcttaaggagaggcattctgactatataattctgatggctaaggccctagtgaggccagtggggtttggagcacatgaagtgtcagggaccccactgacagcctagtgaaacctacggaattcttcctcacaacattgtttttaaatgcatcaagcaaaatgcatgctatttcaaagaaaacttatcatattacgatacacttatccaaatattaaagatgatatagtaacccatgagatgtgtttttttcattatcaaattaaatgaaaagatccaacagtggaagtaacaatgctataatttcaatgtaatgatcaacatcaacaatattttgagatatccactacaatttcataatgtaatatggaaagatctgtgattgcattattgacaaactcatgtgctatgaaaactactgtgttttgttgtctacattcataacctaacaaaatgctaaatttcagccagaaatgtgtgaaaaagagattatctgttggaaccaatatggcttaccggagttaacgcagaaagagcttgctgacgycacagcctgaatttccaccacaggttcttactaactccctcccaaatttgcacatgagacccatgatgaggcatgaagagataactgtgcatgcctgaggactttctagatttcctctttcttttaccaatcacctgctaatcccagaatccaccccctaagtctcttctgataaaaatacttccttaaagccagcacaggaagacaggtttgagctggactcctgtgtcctgtgagtcgactttgcaataaaagcttttcttcgaaaccctttatcagagtattggcttctagcgcatcgaagagtgagccctttcgctcaataatacccccagaggttgttcctcagatcacagtctgagaaccacctctcatggaaccatatccatttgtggccatcccagagcagcccctacaacatggacctatgcttacaactcctggccagctattcaggaagaggctgggggccttccttttccacatatgctctgtttttcagatcacataattttactttcttcataggtgtgccaaaataaaaaaaataacactctcaaactcttccacttaaataggaagacatctattcctttcttattaatgttataacattaaatgtcatatatacctgcaaagataaggttatgttggccgtggcagatgtcttcaagatctcatcaatatttctttgttcttgtcatagcagcagagtcactgagagttttgcatctggccttggagaaaggtgttctggaagttaagggtgactcatattactagtttctgatctgatgattccaaccagcagcttgctgtgacaactgtttgagttccgccaatagctaactttgccgtgccttgttaccgatagacaactggaagatgtcgggtcacgtgcytgtctctacccttcaaagtggctctgttattttctcattggtcaacaccagtatggtgattcaatatcttccagttactagttagcaagaatggaaggtgaaggtagctattttctgcactttaggaaacaggttatagattagctgagcctgttggttaccactattaacataaatgaagtcacaaatgtgcatggcatgtggggagttaaaggtaaaatatcacacaaaaaatagatcttatgtaacaataaaatctcccttcttgaccttttgccaggatgtcttcccaatttgaaatgagatcttggtacatttcccctctaacaaaggccaccttgtactggggcaaatgaaaagctgaatatgtcattccagcagttcataaatgcagaaaccgagtctctctttctctctctctctctctgtccctccctctctctctctcactttctctctctctctccgtgtgtgtgtgtatgtgtgcttttccacatactgagcatttgaagcaaacacaaaagattcactactgtgaacactgttatttacagttcttaggtgccaccaaaagagctctctgtaccctcatatattactggcaggaatgggggtgtaaaatggtgctgccacattagaaagcagttttgcagttcttcaaaaagttaaagacttgtcacatgacccatgattccactcctaggtatattccaggcagaattttaaaacgtgtcagctcatagcagcatcgttcataacaggcaaaaagtatcaacaacctagatgtatatcagctgatacatgcctaaacaaaatgtggtctatccatgcagtggatactatccagacatggaaaggaacagacactgatacctgaaatggtgtggatgaactttgaaaatatcatgccaagtaaaagaagccagacacagatggccacatattgtattactgcatttatatgaaatgttcacaataggcaaatccataaggacagaaagtaggttagtggctgcagaaacagggggagatgggaatggggagtgaccactaattatttttgggggtggcaaaaatgttctggaattagatagtggtgatagtttcagaattttgtaaatatatttttaaaaacactgaattgtatactttaaaagagtgaatcttatggtttggaaattatatgtcaatttaaaaatccactttagctggcttaagaaaaattttaaaaagatattggtgactcattgaaactccggtaggactagagagtcaggtttgtaggccatgtggctagggacaagccccaggttaccctgtagcggtttctactgccactgccctgagcacatatctggcagctcgcaaccccaaatactgagcataggatgccactaggtctcttgtccctgctgcctctgaaacgagctatgcttccaacatcctggattttacatggtacctccttatctacaccttcttctggatgtaagtcactcacaggaatatctcattcacaaagctccagccacttgcctctaccttggatgaaagaaaggctgtgaaagagaatttctagctgtttctttggggaggcagaatttggagaaaaagtccttaagttgatttaagtaagaggttttctttttctttttaaagaaagatcctccgtttttaaatttttttcaacttttattttagattcagggtctaagattcagggtgcatatacaggttcatttcaagggtatattgtgtgatgctgaggtttggggtgtgattgaacctgtcacctaggtagtgagtatagtacccaataggtagtgttactacctttgtctccctccccacctcccccatcttagcaagaggttttgaaagatgctgagccatcgaagaacatgacaaatgtccactagaggcatcttcccactttaggtttgtatacattctttctcttttattttttttgagatggagttttgctctcgttgtccaggctggagtgcaatagggcaatctcaactcactgccagctccacctcctgagttcaagcgattctcctgcctcagcctcctgggtagctgggattacagccgcctgccaccatgcctggctgtgcagatggggtttcaccacgttggccaggctggtctcaaactcctgacctcaggtgatccgcccacctcggcctcccaacgtgctgggattacaggtgtgagccactgcacctggacgggtttgtataattgctactttaatggtacttcactatttagaataattggtggaaaggatcatttgaattaatgaaaagctgagttataccaagagaactctggaggatgaaaatggagaaaagaacaaagtgatgaactaagagctaatccttctttcacttacttattaaataaatagctatatatttaaaaagaactatggatattgggcagagtgctaagcacaggagatacaacagtgaagaagatagacaagaccctagctcttgagccctttaggctacatgtatagatgaggaaacataacgtgacaagtaatcagatatgaacagggatacagaagagggacaatgagtagaaaaaaaaccaccttccccttttattaacaaaaggagctttcattctgtgtcacatggagaacaagtgttcttttatgacctattggaatatgcactcccctcctccagttgctgtcaactttataaggcaataaattaattgtggcagaagctggctacctcagcccagttacctttgctcagtgctccctatgaattgctgagggagagatacagcatagaaaaaaacaaggtgatgcggtgagtacgcttctccatgcaagcagggctttgaacaagggcaggaaggtccctttctttttgtgtgattttctgtctgctgctctgttaagtgatctggatgcccatgttttycttctggacttaatattttcttccttttccataaaatatgaggagtgaggatgagatagttgatggagaggagagactgtgtgtgtgtgtgtgtgtgtgtgtgtgtgtgtgtgtgtgtgtgtggtgtcagtgtttggaggacaggttgggggaggtctggtgtgagatcctcctctctcaytgggagaaattaaggacagaggaaayagatgggatccttctggaaactatctcaagatggcatggatttggaggaaggtgaattcctcccagctttgggcaggaagggtttctaagtaggcaagaatttctacctttaggaatccccatcctgtcctctgcctgaatgacaatagctcctaaggcaggaaaatacccagggttattcccagagcgttcctgtacttcctgagctaaggtgctgaacctgctccctcaggaggattgaggagctgtggagtaggtccctgctgctgatttttagaagctagaaagaaaaaagtctccctgtggagagaaataatacttgcagaaagagaccaattgatgaataatgcctttgctgtggtattgagttgtgggctgtatgtataagaaacgaagtttgataccatagcactcttagggtaggtccttcctacttctttctctacctgaaattccaccaytggagaccgatcctctaagtctttaagctctgcagcctaggatacattgtcgagagagtattcaagtactattttaaaaagtagcggctctcggtgtttgtctcagttccaccactaaccgtgactagacaaaatttcttaatattcatctataaaatggaaatcatgatatctgtctgatcagcttcaatgcagggattttatgagaatacagtcatatgatatatattttatagggattagagtatatcttttaaataatttagactaaaagagagacaactgattaatttaggtaaatagtaaagaatagttaataaacctcaattttaatcccaaacctcgtgtctccaagggctaagggttcttcctaaatgcctgttggcaaattacctgtaggtcctagttccttacctctatttcaatattaaagtgcttcttttatggaattattacacattaacctaaaggctactgtaattaaaaattgaagctatatacctatataaaaatatttgtagaaatggtcgtggcattggggaggagttgagaagagcagggaggcagggaaatgaaaagtaagaggagatgcaaaatcaacataaaaataagagagagaacagtytttgtccctgctgacttatatttaatagcttgttgctgcataagtgctggtttagtatggtgggaatatggggagaggagacgctgagcagctggggttaggacgtgccatgaagacctttgatcacaaagctaaagggtttttggtttattcagagatccattaaaggcttgaatataggagatccaaatgaccctgtttgtgctggtcacttgggtaatgacccaaagataccgggaaagtagtctgactgaactgttaactggctgtgagaactaacagaatgagaggaattaaaaaaagattcctaggttttttttttataatgtgattctattcctcaagttattaattatttgaagaacagataatttggccaaattggcaggaactgggagtgaggtgtggggagagatgatttcatgtttaaacatgttaaatcttattgaatctgtgggacatccaataggcagttgaatatatgaatctaaatccctgggctagaaatacaggttggattgccatcacatgtcatataaagtcacatgagtggtggagattacccaacgtgtctgcgtagtttaaaaaagaagcctataccagaatttggggggcatcaacatttaatgaaatagggctgagcgtggtgcctcacgcaggtaatcctagcattttgggaggccaaggcgggcggatcacctgaggttaggagttcaagaccaacctggccaacatggtgaaaccctgtctctacaaaaatataaaaattagctgggcatgatggcgggtgcctgtagtcctagctactcgcggggctgaggcgggagaatcacttgaacctgggtggcggaggttgcggtgagccgagatcgcgccactgcactccagccagggcaacagagcgagactccatctcaaaaaaagaaagaaagaaagaargaaagaaagaaagaaagaaagaaagaaagaaagaaagaaagaaagaaagaaagaaagaaagaaagagaraaagaaagaaagaaataggagactacaaagaatattgaagataagccagaaatagaggtggaaagccaagattcctatcaaggaatccatatgtggaaagtttcatggaggagaaagtggttaagtgattaagacagcgcccattgtattcagccactatgtcactagtaacctcggtgggagcatttccagtggaatgcagaaaacacagccaagccaataacacatgaggaagggaatacagaaagtgtggaactatcgttttggaagattggcactggaaagaaaaagaatgttattatgctacctgcagaagcacacagagtcattaacagagtttggggtgacttggggtatatttatgaaggaaagatattcagagagtgaatttgataatgcaagacaataagagataattggtggaatgaaatttttgagaaattcaacagctgtgagatctagataacagatrcaaggattatgcttaaacaagaagaggaaaaactgtttcattgagaatagagggggaaaaataagaatttacctagatgtgaataacctttgtggaaacgcttgggttgagaagcagagagagagaatagtttctgcaaaatcattattttttgggtgatatcagagatgatactgcatgagaataagagtgtaggtaatagagtcaggcctgaaaagaaggatagaaggaacaattttttaaattacaggcacggtggctcatgctgtaatcccagcactttgggaggccgaggtrrgtggatcayttaaggtcaggagttcgagactagcctggccaacgtggtgaaatcctatctctactaaaaatacaaaaagttagccacacgtagtggcatgcacttgtagtcccagctactcaggaagctgaggcaggataatcccttgaacctgggargtggaggttgcagtgagttgagattgcgccactgcactccagggtgacactccgtctgcaaaaaartaaaataaaataaaaataaaattactgctgcgaaaagtgagaggcactgtcaagaccatcagtcggcttgcaggcccagtttatttaggagattatgagcctcggtggcatctcccttgagttacgtgcggcagcacagaaggcagatgtttggatggatagtttcatcctgcagattctgttagcagatagagagcgaggaagatgagagcaatggcaagttaaataatcaatactgaggcctaggtcagttagggttaacagctaggaagggctaagagattaaaaggaaatggaaagataacagctgccttgatgtgataagatacttttttaaaataaagtaaggcaggctgggtgctgtggctcatgcctgtaatcccagcactttgggaggccaaggtgggcagatcagctgagatcaggagttcgagaccagcctgaccaacatgaagaaaccttgtctctactaaagatacaaaattagcagggcatggtgacgcatgcctgtaatcccagctactcgggaggctgaggcaggagaattgggtgaacccaggaggcagatgtttcggtgaggcgagatcgtgccattgcactccagctgggcaacaagagtgaaactccatctcaaaatatataaataaataaataaataaaataaagtcagacaatgagacagtaaaaggacattgctcatttgcatatggatttacaatttcaaaagtgtaacagttctggggatgataaattccaggggctagcaaacatttgaggatgatggagatggaatggcgaagaaggcattgcagctgagggctgtcatggatctgtagacatgtaataatgttagatttactataattagagcagaaaaatgagaacacatccagtgtctgatgtcatttttgtagatgaagaaatacaggtccaaataggtaaatagcccatctgttagtaagaaaatcaggacaagaattcaacccctttgattcccagttcagtacatcctccaatatagaaaatattttaaatcttgggtcaataaatgatcttcggggttactgggagccacgaaatttatgtgagttgtttgctgtgaacctcccagcaagacttatgctgggtatcaggatcatttttgttaccagatccttgagagtgtcagtgacgtttaaacagtctcaacagtgacttcagcatcatgtccagggcagttgaaagaagaagacttggattccagttttgctactttctctctccctgagcataccttcctgtctactacattaggtggatgtgaagatcaaagtgaaatctaaagggttttgtgagctacctcagcccctcatctctcttctgtgtgttattccacaacattttcccttcagttcttcatgtctgatatacttttccttggacaatcctcagttcctctacatgcaaaaaaggcaagagctctacaggtgttggatgtaaagctagagttaattagggacactgataagtggaaacaaatattctttagattatgtaaagaggatgctgataatcaaggtcatcttgcaaacaattccacatttggatacaatgattatgtatcctcttagattggtggggccttgtgatttgttttaacccaattatctgtgtctatctagatggcgaggaagctcagtgtattggaagtccttctgatcatcttctgcttaattgtggtgaccatagatatcctcttgctgcttcttgtgttggaggaaacttcaggtaagggagatgcttgtaggttggaaggctgggtaaaggaagtctcctgtaaacgccaaagagattattttattcttttacttttcaatatgccactacattgcagtattcaaaattcacttccatgattagtttaagttcaactccaaaagataagtgttctttttctgcactgaaaccttgaatgttagtgacatttagggtctcccaagccccatttagtgcaattttaacaagatgcaaaattaggctcaccagatgcctgcccttcaacccagagtcatgaagtcgtactgccttcaatgagaaaggactgttaagctaacagtgcccagccccattatattatggaaaaggaaactaaggttacagggaggtggtgggatgattaagttggcctggttataccaacatacatagctatagtttcttcataggtgcctttgaaaccgttctgtctgtctgtctctctctcaggcacccagaagcatcaaacagaatgccttctctttcacgcacatattataatttaaataataaaatgtgtgtagttcaaaaatgtattttcagttaaagctgaatttgggctttgttctgcttgacaagctcactttacagatgtgaattgaacctacagtgaaaagaagctgtcctgatggcagaaccctacctgctccatctcttttcacctctctccacagtaaacattaagacactttctaggaactattacaactttgaaagatgatctgaaaaccattgatataagccattttgagattattcctacttctcccctctaacacatttttcgggtaacaagtctcctgagattgctatccagtgtatatgactaattggtttattttatttgatataaaactagatcttcacacctgcattcaccttaaaccacattctgatttatgcagagtagttctgctttcaactgtttttttttcttctgttttttttttgaagatgtatttccatgggttgaaaggggggctttaaaatcaatttgtttttattgtggtaagaacagaacagaacatctaccctcttactggatttttaagtgtataatacagtattgttatctattgaaacaatgttgtacatcagatttctggaacttattcatctcgcataactgaaatgttatactggggattagcaactccgcactccctcttccccctaactcctgacaactaccattctcttctttgcttctgtgaatttgactattttaaataatttatgtaagtggactcccagagtatttatccttttgtgactggcttaattcactttgcataatgtcctcaaggttcatccatgttgttgcatattgcaggaatccagttttaagacaattttttattgaaatatatatatatgtacacaaacaaatgtagagccgtaaagatagtgatagtgaatatatttgggggctttgttttgaatcaaaacgaaagcactaaggggcacctgctaatacccacggtaactgtttcctccaaattctgctgaaattctggattttagatggttcatggagtccatgaaccagtcctacttctgctgttgtcatggggagaagattccacaaagttgataaagcctaaagtaagaatagccaatgttgagtgaagatgtgtatttccaatggggccaataatatcttcctgatatgtagcctgagccctctggtgtctttaagcagctgtgcctacaaataagagactaaagaaaaaacagtaagaaaaaagactttcccagcgatttattcagggcttccctggtaacaacaacaaaaaaatgttggatctctacctgacaacatatataaacattgactcaaaattgatcaaagacttaatataagagctaaaactataaaactctaggaacatgtaaataaaaatgtctgtgaccttggattagataacagtttcttagatgatacccaaagcacagcaaacaaagaaaaaaataggcaaattggacttcatcaaaattgaaaaaaactttgtgctttgaagcacactttgaagaaaactatcaagaatgtgaaaaacaatccacagattcagggaacatacctgcagatgatgtatccgatgttaggcccttatcagatatatcatttgcagatatatttctttttacatcctaagataatacattggaatataagagaatatattctcttaggatgtataaagaaatactacaaatccaaatttaaaaaaaaaaggtttctaaatgagtaaaacatttaaatagacatttctcccaaggaaatctataaatggccactaaacccatgaaagtatattcaacatcattggttatttgggaagcgcaagtcaaaacaataacatatcactttcacacccactatgatgactataattaaaaacagataaaaacaagtgttgttgaggttacagagaaactggcttctacatggctaagatggtgtggttactttggaaaactttgccagttcctcgaaaagctacagatagagttaaccacatgacctaacaattccacttctaggtatataaccaagaaaactgaaaacatagctcacagagaaacttacgcgaatgctcatagcaggattatgtataatggtcaaaaagtagaaacaacccaaatgtacatgaaccgatgaatagataaacaaaatgtggtatatccacacacaaaaaatgtgattcagccattaaaagcaatgaagcactgatacatactacaacatggattaacctgcaaaaccttatgccaggtgaaaggagccaggcacaaaaggccacacattttatgattctttttataggaaatgttcagaataggcaaatccatagtgatagaaaatagatgagtgtttgccagggattgggagaacaggggaatagaagatagctgctaaagtgtatgttatttctttttggagtgatgaaatcgttctggaattcgacagcggtcacaggttgtacaacttcataactaaaaaccattgacatatactttaagaggatgaattttgtggtatataaattgtatctgtttaaaaagcaaacaaagtagaaataaacgtgtttaaacttggagaagtgttaaacatcatgtgcaaatatagataccagtttggagaagtgttaaacattgtatgcaaatgtagataccagctaccggtgatctgttgtgtggagaattggccaaaagtctgtaactttgctggcttccttcctggagctgtgattacactacacattttcaactttatcctttaattcctatgcagatacttcatttactccagagtgcccagagattccccagtcggaaaggatagactgcacacctgaccaggaggtgaccgaggtcagagaaataaggtcccttttggtggcctacagggtgttattgaaaagaaatgaatatgtgaagtggggaaagggtgggggtggcatggcttctgggcctctgatttgtttggagttctttctttcttatcttattgaaataacaatattaagatcgtgagggaagcagggttgaaaaaaaggaagagtaggaaaagctaacaagaatgttaatctgtggattataaagtccaaggtggagggcgattacaggtgttactaaatgtaccttaggtgtgattccaaggatagtggtagaaaggttaaatgtttgtgggctagactatgtattctttgagaatagaggccattaagcacatgcaaatagggaaatccatagtgatagaaaatagattagcatttacctgagtcactggctgagtcacctacggaactcaggcaaattgttacaagagccctctggattatgttattggcaatagaggtcccaatggatacgtgctaaggaacacaggttttctcccagagtagcttccataaaatatcagcgacttgaaccctgattagttgtgacttargactttttcataaaggttgtatgtatttatatatttaaattttatttcttggccccatattctaaattctatatcttcttgagatattaattaggacagtattgaattttaggttaaagtttaaacaatattcacattttgatagttttgaatcttcttgttataaaaacatagaaagtgtctccatttcagttcttttcatatatacatatatttctttcttttcttttttttgagacagagtctcaccttgtctcctggctggagtgcagtggcgcggatcttggctcactgcaacctctgcctcccaggttcaagcaattcttgtgcctcagcctcccgaggagctgggattacaggcacctgccaccatgcccagctaaattttgtatttttagtagaggcagggtttcaccgtgttggccaggaggcctcaaactcctgaccccaggtgatccacctgcctcagcctcccaaaatgctgggcttacaggtgtgagccactacgcccggcccatatatgcatatatttatttcttaactgagttttatgtttctcttatatgttttattgcatgtgaattatgatgttttccctacgtatttcacatccttggtttctactgtaaatataatccattatattttgtaagttgtgcttcttttattataatgcttcttttcttactattattttatttttatatttattatttttactttatattatgtttacacagtatatttatattctatttattatataattgatcaagttaaatctcatattgtttataaaaaatgttttgtagtccctcctctggatattaagtatagaattatattataggaaaataaggataatttttctttgtattaatattatcttatacattcatatgtctaatcgtattgtctatttcttccagaataatgtaattaaagtgatgatggttggcaacccttattttatgcttgactttaatggaaatttgggcaaagtatcaagcacaaagttagctattggcttaagagaattgttttattgatatatgttaggaaccatctttatattcttattttaacttttttttaaaagaaatggaaaatggattttttccaacaatttagtattgaactttgcaaacaagtttacaataatactcattacctcccacttaaatttcaccattaatattttactttgccttctcgtatttatcacttatcccacacttcattcatctattaatctatctgatttctatggatttgaaagtaagttctagaaaccagttcactttttcataaatttctcaccaagtatattattagctacagtccaaagtttgattatagttatttatcttcagatattacacttatatacaatgcaaatacaaagagttgttattaatacattttgcacgattctttggcacacatttgttgaattatggcaaatgactacacatgtgtaagccaaaccattctatacccaaagatacagaatgttaccatcacttcagaaagttatcttatgacatttcccaatagttattccgacttgtaccccttaacaggtaatcactgatatgatttatctccaccttagtttagttttgcttgttgcagaacttcatatgaatggaatcacatagcgtagtgtaaagcctctttcattcagcacatttttgagattcatctttattgttgcaaatattagataattctttgtaccactgagtgatattccattgtatgagtatgccatagtttaaccattcttcccttggcatatagtaggatgttgtccacttcatccatattttcaaatttataaactttgagttctattaaatatgtttttgttgttgttgttgttgttggatgaaatctcgttctgtcgccagactggagtgcactggggcgatctcggctcactgcaacctctgcctccccggttcaagcaattctcctgcctcagccttctgagtagctgggactacaggcatgcaccaccatgcccagctaatttttgtatttttagtagagacggggtttcaccatattggccaggatggtctcttgaccttgtaatccacccccttcagcctcccaaagtgctggaattacaggggtgagccaccgcgcccgacctcaaaattatttttatgagatttagcctattgttaggtatagttatattcttttttttttttctgtatccaccctactcttgataggcaattgtgagttttcatctagagattttttttttacagcacgattcaaaaaaatttgcatcaaatttttgggtatcttcgggtgaacagttggaataatttttattggctctatacctaaggatggaactttcagtctataggatatgtacatgtttaactttagctgacactgcaaaatcatttttcaaagtatttgtatcaatttgcatttcttttagtagtatacaggagttcatttgctctacatcctaatcaacgcttggtgttttctcctttttcaatttaaccattctatggttttaattttcatgtttctcatgactaataaggttaaatatctttagaaatgcttattggctagttggtaatcatatttatggaatgtctttttaactttttgcctttttttctactgaactgttcatcttttttattgctttgtagtagttacttatgtattctggatacaaatcctttgttagatatatatcttagtctatggtttgtcttttaactctcttaatggcgactgttgatgacaaatagctcacaattttaaaatagttcactttatcactttttcaatggttggttcatttcatattctatttagtaattcttgcctactccgaggtcagaaaaatatattactatctttcccttaaaagcattattgttttatccttcaaatgtaggtcttttatgaatatagtactgatttttgtatatggtatcaggtaagagtccagaaactttttttttttttttttttttttttttgagacggagtcttgctctgtctcccaggctggagcgcagaggcgcaatcttggctcactgcaacctccacctcccaggttcaggtgattctcacacctcagcttcctgagtagctgggattataggcacccgctatcatgcctggctaattttttgtatttttagtagagatgaggtttcaccatttttgtcaggctgttctcgaactcctgaccttgtgatccgcccacctcagcctcccaaagtgctgggattacaggcatgagccaccacacctggcccagaaacgttttttttcttgaatttttaatcgatccatcaccacttattgaactgaccatctttttccctctgcattttagtgacacctttcctgtaaattatgtctttataggtatggatctgcttctggaatgtattttgttgagttactagtttgttcttttgccaataccatacagccttaataactattgctttatgataggtcttaatgtgtggttgtagaagtcctccaaatcattcttacttttcttcaagattgcctagcttattctttgccctttaggtttctgaatacattttaattttaatgtctctcataccagcctgccagttttctcacaaaacttactagaaattttattgtgattacataaaatttacaggttaaatttgggaaaattaccatctttacaagggtgaatatttcaattcctaaacatggtatatatctttctatgtactgagattttagttttgaaatttttgatatagagcttttgcacatggttttgctacttttttcctatttgattctattcaaatcttattcttaaattttaattttctgtttctcttatatatatagatttaaaattgatttttgaatactgatcttgtaactagaaatcttaaatttacttattaattgtcctagtttgtagactcttgtttttttctgacatgataatgttacctgcaaataataacagttggaagttttttccaatgtgcattccattttcttccatgtcttttaactcataggttacaagattctcttttctttctaaattgtcaatatagtttgagacagtttatctgaaaggcaacatgcagctatggtaggttttagaaaatggaacttcctggagactgattttaactaaacctaataaataacattgaataaaatactaattatagaagaggaatttcctggttttggaagaagttggttacatatcatttacagattttcagcatctatcagagactctattgaagaaatccctgcatcaaatgaaagttgtagtagataatttggggtctgggatattggtaatggttgaaaactgaagtagggatgttagagcagaccacttacttaaatgtttattgctttttatagaggtctgtggactttgaaacaatttatgacaatgaaactgaccttttgaattagactgaccccagtttcagagggagcagagctacttaatgtctgccttaggaaaatcaattatcyacaggccacccagacccccaaattctttcttcactgatcccttccagccttttttgttatctgaagacaatgagacaggaatgtcaattagatttatggagagttaataagtatatttaaaaagattgtatggttataatataattactttgtttataataggtatgaagcactgacttaagttgtatttacattgtggcttttcaggaaaatgacatcagatgttagcatctgaaatacttgtcagcactacgcctttttcaaatgagtagtgttgtgacatattcttgtttttggtgtcacaatccacactgaacacagtcctttaacaggaaagattcagacattatagttatgtacagaacaaaatgagaaagtattaatgtttcctgtctatctccaaattactccccccagaatcacccagaatcaaatcaatggcttagtgtatatccttctcttgatctttataagcttttgcatctatatatttattttgttttaacgaaaatttgattatactatatatttttccaacttgctttttaaatttaaggcatttgaatttaccacattatatttttaaaataggttgcttcagttgagattaccatatgattttcttttgtcagtgttgtgaattatgttaaaatattttttaatttggaaccattttcacttttgcttaatgagacctattcatatattgtgtattaattcttttaatatatgaacgaattcaaattgctaatattttattgatatttcgcacatctatgttttttaaatgaaatgggcctatgtatttttatttacttgtttatttggactgtcctttttcagtttgttaccagaactattctagttttataaaatgaattaggaaacttttcacctttttctatattctgaaaatacagtatatataatatgaggatattttattcctcaaatcatttgggcaattttttttttttagggaaagattcttaactatctttcacaatttttcatggtcactggacatttcaggttttctatctcctcttagacaattttgattatttaaattttactgtgtaaagatttatttaatttagagtttcacattcattggctaatatttgttatgaataagttttctcatgattcttactcattctttatatctgttgtcattttttattcttgtgttaagccttgtttgtttcccttttttgtcaaaataagactttaagatatttctatttccttgatctttccaaagaaacccttagattgattgatttgccagactaataacaaaacttatcctcacactatagtaatatcagtgtggagttataacaggaattgacatataagccatttgaatataataagaagtcccaaaatgcatattcacatgcttatatgtatgcacttaaatttagtttataatgaaaatgacactgcaaatcagtggtggaaacaagctggatatgattaatggtggtatctgtcttcctgtccttgcagacaactctgtgccactggaatctggatgaattctttaaacagagcaggcactcaatggatgttttgaattgatgaatgtagttacttgcttctttataattactgttttagtttttattattttacacacttttgtgggtgtattttgtacttttctagtgtcttgggttgtacattgagttgttaatgatccatgacattttatttgcttttctttccctaatttgtcttctcctttctctttctggagtcttcttagttgagtgctgctatctgagtctgtcagtcacttcatytactctttctttcatattttccattttttttatattattttctgggataattgaatttgatttttaaagtttttttcataacacttctctttggttgttttcttttgtaattcagtttaaatattmaggagctttaaatcttgttctaaatcttaacagtacacattcctcatttttttaatggaagtgatatggtttgatcctgtgtccccacccaaatctcaccttgaattttaatactcccagtgtgtcaagggtgggccaggtggagataattgaatcatggggcactttcccccatactgttcttatggtagtgaataagtctcatgagatctgatggttttataaaggggagttcccctgcacaagctctcttgcctgccgccatgtaagacatccctttgcacttccttcatcttccaccatgactgtgaggcctccccagccatgtggaamtgtgagtccattaaatgtctttcctttataaattacacagtcttgggtatgtctctgttagcagcatgagaactgactaatacagtaaattggtaccaggtagtggggtgctgctgtaaagatacctgaaaatgtggaagcgactttggaattgggtaacaggctgaggttggaacagtttgaaaggctcagaagaggacaggaagatgtaggaaagtttggaacttccttgagacttgttgaatggcttttctcagatggagatgaggaacttgttgggaactggaataaaggtgactcttgctatgttttagcaaagagactggtggcattttacccctaccctagagatctgtggaactttgaacttgagagagatgatttagggtatctggcagaagaaatttgtaagcagcaaagtgttcaagaggtaacttgggtgctgttaaaggcgttcagcttatgtattcatgaagatatggtttggaattggaacttatgtttaaaagggaagtagagtataaaagttcagaaaatttgcagcctgatgatgcaatagaaaagaaaaacccattttctgaggagaaattcaagccagctgcagaaatttacataagtaacaaggagtcaaatggtaattgccaagacaacgggaaaaatggctccagggcgtcagaggtcttcagagcagtacctcccatcacaggccaggaagcctcggacagwaaaatggttccatgggccaggcccagggtctcccctgctctgtgcagcctagggacttggggtcctgtgtcccagcagctccagacatggctaaaagggacmaaagtacagctcgggccatggcttcagagtgtataagccccaagtcttggctgcttctacatgttgttgagcctgtgggtgcatagaagtcaagcaccgaggtataggaacctctacctagatttcagaggacgtatggaaatgcctggatggccaggcacaagttttctgcataggtggagtccttatggagatcctctgctagggcagtgcggaagggaaatgtggggtcagagccccaacaaaaagtccccactggggygcagcctagtgaagttgggagaagagggccactgtcctccagcccccagaatggtagatccactgatggcttgcactgcatgcccggaaaagccgcagacactcaatgccagcccatgaaagcagccaagaggggggctgtacatgcagagccacagaggcagagctgctcaaggctgtgggagcccacctctcacatcagcatgacctggatgtgagacatggagtcaaaggagattatttcagagctttaggatttgacagcctcattggatttcagacttgcatggggcctgtagccccttcattttgaccaatttctcccatttggaatgggtatatttacccaatgcctgtaccccattgtatctaggaagtaactaacttgcttttgattttacaggctcataggctaaagggacttgccttgtctcagatgagactttggacttgtacttttggattaatgctggaatgagttaaaactttaagggactattggaagggcatgattatgttttgaaacgcgaggccatgagatttgagaggggcccggtgcagaatgacatggtttgactctgtgtccccacctaaatcgcaccttgaattgtaattgaatttcaattgtagttgtaattgtaattgaaatttcaattgtaggccaggcgcggtggctcatgcctgtaatcccagcactttgggaggctgaggtgggtggatcacctgaggtcaggagttcgagactagcctggccaacatggtgaaaccctgtctctactaaaaatacaaaaattagccaggtgtggtggtgggagcctgtaatcctagctactcaggaggctgaggcagtagaataacttgaacccaggaggcagagattacagtgagccgagactgcaccattgcactccagactgggcaacaagaacaaaactctgtctcaaaaaaaaaaaaaaaaaaaaaaaaaaaaaaaaaaaaaaaagaaattcagttgtaattgaatttctcacctgccacattgcattttattttgctgttttataaacagatttgtaatttttttcttaaaatcatttctgtcatttcatgtaaatttagttaggtgagraaggtgaatgcctgtgtttattctaacacagtggtctcagttgccatttgttttatttatcataacaaaataattttatgtaaattaacctgaaaattataagacctttacaaaataaatcttgctaaataacaccaaaagaatatttataatcaaaccactctgagaaagaaccacatgtgatttgtttttgccttggacatagcagagatattgtgaatttctatgttaccctctgtcctagttttattttaatcgtctctagttttcttagcttcactttgcttactttttggaaatgcatttcttcttttgctgtattgttagccacttgcatgactctttctcatgggaaagtccaaacttcttggactggcttccagcccactcttggtaaaaatactatgtgatttccagcttcattctcatacttaatgtttttggcacaagaaatgtgtggtttttctgagtctgtcatgcactgctgctttctccrccaggaatactgttcctctgtctaacctcccctggtgcttcatgatgggacttacctttcacttacctggaagctctccctaccccactccacgcctactaggctgggtacagtgactgtgtgttccctcagctcctggacacacttggtggagccctcatatcatcatactgtatgtaattgctttcctaattgtatggatttgccactagacagtagtttgctgaaggcacaagctatgtcttatttatctgtattatcagttccatgtctggtagataataaatacatattggacagttggatagattcatgaataaataaagaacaaataaattaatgaatgtaattataacctatcttaaattctccttggaataaaatgggttataaataaatagacagataatactttccttccctcagtttatatactgctaactctgtgtcattgttacaggatatctgcagatggcaatataagtgctgctggtcgcctgtggcagatgccaatgtccctaggtgcttcttcccctggaactggggctatgaagccagcaatggccatacaaatacaagcacaggtgagcactgccctgatgttgcgcctgggaacaactccttatggcccagatacgttaactgcaaaataaaataaaagctaaaagtcaggcaggcgtggtggctcacgtctgtaatcccagcacttcgagaggctgacgtgggtggatcatgaggtcaggagttcaagaccagcctgaccaatgtggtgaaaccccgtctctactaaaaatacaaaaattagctgggtgtggtggcagctgcctgtaatcccagctactcaggaggcagaggcaggagaatcatttgaacctgggaggtggaggttgcagtgagccgagatcacgtcttgcactccagcctgggccacagggcaagactccatctcaaaacaaaaacaaaaacaaaacaaaaccaaacactaaaagttagtctccttttctctctctccatatcttgccacccctaggatttactgcccagttgaaaaggttgccatcaccatctctgtttggaaatgatgtcgccaccacccttttcacagctgaatatcagacatccaatcggtttcattttaaggttggtttgggagtgactgctaaatacatttctgaagaaagcagtgtgctcacattgggcttgaagtgtggaggcagaaggtacctctctccctctctgcaggaatctctggatggcatgggcaggctaatttttatttgatggggcacatgtaattgggtgatttcacaaatcagaagccacaaggtgaagaattagaagctattctcatggggtgtcatttgagatggaacrtcttttgtagctctgtctacaaggaagtggtcttatctgcagttgtcccttctgtttttcttttgacagatcactgactttaataacatacgctatgaagtttcccatraaaatattaacctggttgatgggattgctgatgcctccaatttgagctattacgtggaggttactgataaacctttcagcatcaaaataatgaggacaagcaacagaagagtcttgtgagcttttcaaccctcttggtgcatctttgaacacacagttctaatattactcattctgatttactgggggtgggcagtgaaatcagtacaactagagaaaatgtttgaatattagaaaaatgtccaagggtttgctgtaaaataacagtgttagcctatcatgctcgtaaaacagagaatactaaaaggtaatactaaaatgtttgctaagttatataattttatataattatataatacataattatatgtaatttaatataatttatataatatataattacatatataatttatataatatataattatataatataataataatatattattactattaatataattaataatattataattatatttaaattataaaattataaatttcataatttaaaattaaattaaattataaaaatttaaatgtaatttaaaatatataaaatatataatttaattatacattccatatactttatataatttaatcaactatataatttatatatttaatacataatttaaaattaaattataaaaatgaagaatatagttataattaaaatataataaatatattaattataatataattaataatattaattaatataattaatattaataatattaatagaaatatgtaataacatataatatataatatataattatataatataatatataattacatgtcatataattatgtataatataatatataattataagtaatataattatataaatatatagatattatatattaaattaaatataatatataatatataacatatgtatttaatatacaaatatgtcatatttatacgttaaatatatttacatattatatatgcatttatattaaaatatttaacatatatttaatatatattaatttatatttatatttaatttatattttcatttaattatatttagttttaatttaatcagtttaattatatttaatttatatttaatatttatttaatagacattaatttatatttaatataaatatttaacatatttaataaatgttaatttatatttaatataaatatttaatacatgttaatatacattaatatattaaatataaatatataaatatatattttacataagataattttttaatataaaatatttatataaaatttaataatatatatttatatatttaaatatatagtatatttaatatgtttatttgtataatatatttatacacagaaatatacttgtggtttacatatattgtaaaataggggattttattgttttaaattattattcatactggaactcaaacttcattgtctatcattttaaattattatttactgtgaattttactatcaagcagtgaccaacagtttcagcttaattcacaaactgtactggagtaaacagaagtattagtgtctgtaaaaccagtattcacatcccggtaccagcagatcaacagtcagctgtgttatatatcaggcaaaatacctatcctcaacagtatcagtttccttgtccaaaaaaagggactcaaaatatccacttttcctaggggcaatgagactttgtttataaaacacccagagcggtgcctggtatgtagtagatgcacattaaacatgaagtcaactctgctctctttccccaattgtccaacctgagctcctggcatcctggccctaatgctgtcttcctctagaattaaagaaccagaggtgccctagaaaggccttcaaaggtagcaagaaaattgctaacgcctgaaacaacagaggtctaagtgtatgtggaaaggagaagatagcttcctggcagaggaaagagtgtttttcggtgattcttgctctacttaccccatggcccaggttggacacgagcatcgggcccctccagtttgcccagcagtacctgcaactgtctttccgactgcccagtgccaatgtgtatgggctgggagagcatgtgcaccagcagtaccgccacaatatgacctggaagacttggcccatcttcacccgggacgctacccccaccgaggtgaggtggctttcctcctgagtatcgcccacagtaagggataccctccttcctttcctaaaagtagcctgcaggaatacatctattttactttgctcactttagatgtgttagtgttgaggaatatttgttcttgaggcctataaattcaggaatatagcaatattaaaaataaaaaaaattaaattagaaattttctagcaattcgaaatgcagcattttttaaacaaatttcacttttaatgggaaatacaatttcatgattatattagaacctagtatatacttctgccaaattactatgtcttggtttaataactgaggaaaggaaggcttcagtaggagccaagctcagtagaacttggtggactaaaaatgtctcttttgacagctttcatactgttctaggtgtttgctagtgaaagtgtgtttcagaaacgtcagcgttggcattacctgggaggttgttaaaaatgcagaatctcaggccatagcccagacccactggatccaaatatgcatttttgcaagatccccaggtgactcacattcatatgaaagtgggagaaagactgctctggattaatgcctctcagcttatctggagtgaaggactagtttcttaaaaaaaaaaaaaaaatctagcactggcaataattttgtaaaatacaattaaaatatattactgaaaaaatgaaataaaaaaactcaaagacataccaaaaaaacstaaattttcagttgaacagacataaaatattacccttttcaattgctataaaagaatttctaaactttgacttttggtttttgcacttgtcttgtggctgactgataacaaagggtttgaggaagtattgttccatggacaaagctttgagtcacataggtttgtagagcatgtcttgaagcctccattgtgctgatgatatttcttggatccatgcaagaactgcaagttgaagtatggtgcaagggagagagctgacattttgcaattcgtatttggcaggagatgaacaaagcaagtagcacattaacctgtagcccagctaccagcatcggatacaatggagggagtgaacttgctgagcagagcaaagacaaaaaagcaatagctaacgcatgtaataaatgtttggtcaaggaccctggcaaatattgaatactatgaatcgtactacgtttgactttctatagctgacattcctaaattgtatagtcacaaattagatgtaatgccttcctgtttttcttcctttcttttttcttgcctttctcccctgtttttttctttctttaaaatgtattttaaaaattttgtctgtatgctatccaagtgtgatgccattagttttcctggctataattttacatctagctgaggcttattgatcttctcaattttgcaaattatgttgattctttcttttccctctcctggtatttaccattatcagtattattgccttatgctttggctaagatgatgatactgtcacacagggaacttgtaaaacgttctccgtattctaatctcaacttcttttattcttacagcacttagagttacacacacacacacacacacacacacacacattatctcttcttaggtcagtgctcatcacagcttcgtcacagatttcaatattttttctttctctttctatcagttttaagcttttttttaaccacttaagtattatatggtaactacagaaacattagaaaatacaactaggtgtaaaaaattcaaaattactcataataccatcactttctgctaatattttggtatacatcatagcaaatatgtttacaaaataacttgattgagttataattcataggccaaaaaattcatctgttttaagtgtgcaattcaatgactttgagcacatatactgagttagacaagcatcgtcataatccagttctatagctttgacatcaccgcaataggatcccttctgccctttgagacttaaactccagagcttgcttcagccctaaccaattactaacctactttctgtccctatagatttgacttttctagatatttcatatcaatgaaatcatacaatatatggttgtttgtgtctgtttctttcccttagcataacactttcaaggtttatttatattgcagtgtgtatgattattttactgttgttgaatggaattcttttgtatagataataccatattttgtttattcattttccagttgataatatcattacaatgcctttttgatacaatgttaaactacatgaagtgttgaccaagtatatgttatagatggcttttgaatttattttagggtgaatgaaaactttctcaacacataacactatgacttttcttctgttttgctgatagggcatgattaatctgtatggagctcatacattcttcttgtgccttgaagatgccaggggctcctcttttggagtatttctgatgaacagtaatgccatgggtaggaagcatctttttatcttctgtaggtaggaatacgttttaggattctgcttttataaaaaattacttttatggtgagatcaactgttgaacagaaggcattttgaacctacaatacttttattgaaactggaacctgaaagtaggttaatctgtctacaaatccaggtgatacttgacattgttttcattgaaaaccacttcaggggtcttctttggtataatgtttcccctcatagtctgtagaaaataggatccactgatagacgcattccaaaaatatctgtagatttcaacgtgtaaattgtgctttctgtctgtaggcaacaaggctgtgttttgtaggctgtttctcacagcccacccacactttccccactccaaatcttccttctccagcttctggattaatggtactctcataagcatttttatttatttttaaatatttaattgtagtcaaactcatctaataaaatttttataacgttttttgagtgaagctactcgcaaaacccagaagcttgtatttttatgtggccaggttaaaatacaatttgttcttctttatcttaaaaaaaaaaaaacaaaactcaattcttcattggtgtcttacacattcaatactttgataaactccaacaacgatcctctgataaaaagacagtgtgattttcatccctttcaaaatgagactgagactcttttaggtggctcaactatttctactgcagagaagagtttacttccaaccataagattctaattaatctcattataattttttcagaggttacccttcagccagctcctgcgatcacttatcgcacgattggaggcattcttgacttttacgtattcctaggaaacactccagaacaagtggttcaggaatacttggaggtatgtctttgcatttagatagtcattatttactgctgttatctcatatactcattataaattaataaaagaaaaataaaaggtattagtaaactgtatggattataaatgctgggatagtgagtctttcatctattgtttatttattttgatgacctttattgggtgctttctgcattccaaagagacactgtgcaaggcttgagaaatgcaaaaagaagtcagacaccatcctgctttcaagtaactcatagtccattcatgtatcccacaaatcagcaaagcttattcattcaataagttaaaattcagtgaaaaggaactacctgaataaactttgctagctattcacatttgactcaaattatagaaaaggaagacgcttgaggttggcygcagtggctcatgcttgtaattccaccactttgggaggccaaggtgggcgaatcacttgaggtcaggaggttgagaccagcctggccaacatggcagagccctgtctctactaaaaatacaaaaattagctgggcatggtggcgtgtgcctgtaatctcactcctaatcccatccattcttattcctttaccctttgcacacaccactatctgaaattatattaggcatttatttatttcctctaagctctctgagggcaggagctatgtttgctctgtgccactatattccaagtgcccatattagcccttgccacactgtgaacaaatattcagaaaaacacttatagaataatgaatgtcaccagtttcccctaagatgacaccattactgaaacattttctgcaaattttattagtgtctgatctgatgttgggaatacatttatgtacttagtaaagaaggatgtgattgtggaatttcacaaattattctagcagattactcttagctctgacgttttcagctctgggaacttcacagaaaatgaaatggggctaatgttattctcaaagcctacacacttacttatcttttcagcttgttggacggccattcttccctccctattggagtcttgggttccagcttagtcgcagggactatggtggcatcaataaattgaaagaagttgtaagccgaaatcgtttagctgagataccatatgtaagtcgaaacttcttttaccatgcagttgacaccaattcccatttttattttttgcattaaattcaatgtattaggaaaaatgtagataaatcattagattgatagacaggcacacttgctggcagaaatttgcatgttaagttatgtatctgagcatgaaaagtatactgttaatgaagcctgatagaggtggctttgaattttagctttacctcttcatagctctgtgcaatgttgcgccagttaattaacatctctgagccttagtttccacctttatagaatgaggatgtaagacttactttggtgggctggtagtaaggaatgccttatactgtgcatgttgaagcatctagcactgatggtgaacatcattcaaagttagctattatgttattagagaaagcaacactggaggtgacatgaggaacaagagctgatgattataatgacttacagtaaatgagtttctcacggtgacctcatatactcctcccagatctgataaactctaattttgaagcttcatggttgcatcagtgtttatgatgttcaatgtccaccagtaagtcaagataattattaagtgtgtaatatttgatgatcttctccaggagatgcataacatgtggctaatgaatttatcaaaacaacttattgggggtagctctttgggattttgaaactttgatgtaagaatatagtgttggcccagtgcggtggctcatgcctgtaatctcagcactttgggaggctgaggcgggcagatcacttgaggtcaggagttcggactagcctggtcaacatggtgaaaccccgtctctattaaaaatacaaaaaaattacccaggtgtggtggcrcatgcctgtaatcccagctacaaagcaggctgaggcaggagaatcacttgaacctggaggcagaggttgtagtgagctgagatcgcgccactacactccagcctgggtgacagagtgaggctctatctcaaaaaaaaaaaaaaaaaaaaagaatatgatgttaacatctgaaggaagactgaacatatggacatggctttggcctgctttcagggttcttcaatgccctctcagagtagtgatgagggcaggcagggggatcaatttttcctgtaaaaaaaaaaacagatggtcaatgtgttttggtgtcaaaggggaattgattgtgtttaattttacttctcccatatctattatctgcaaacatccaattccaggaagaattttcttccgcaaatagaatctttccctacatttgtttgtggaggacacgtgggtcctaaatgactgctcagtattagaacagttgatgccactttgggcaacaggccataagccacattttccttcaggcctgtaaggtcgagactcctactgtatgatacttgaggaacacttagaagaacacttcctttgtctttgaggaaggtggcagattggggaaaaaaagagcatctgaagccaaagagcctgtccccaaagccctcatcagcccccctacctcccagtgcatgtattttgggaaatgtcactgaactcccctacatttcaatttgctcactaagaataacacctgctccctaggctgatatgcaaacacaaggaaaaatgtgtgcatgagagtttagttgataaggctttatctttttgtcattgatctgtgttaatcattactctagcactttcgtagggcaaaagatcattttctcctcatatgatatattctggcttgatgcttgggttaagttagtacatggttataacattaataatatgattcattcaaacaaccatttaaagagcgtctgttttatgtcaagcatccaagctctcaagttaaagagatgaacaagatgcaattcctgctctcaagtccctcccaataccttatgacatgcacctgtcaggacaaggaggtaaaacagcaaccaaacagcaatcatgtctttcaaagatagcttattttctcctaagaagtagccaagccctggaaattccaggatcattagaaaatatggtttcattttcaatggtcaggaaccagagctgtaatactttccatcagcacagtgctgtttcctaggttctgattgaccagagctctctttcaggatgtccagtactctgacatagactacatggatggaaagaaggatttcactgttgatgaagtcgcttactctggtctcccagattttgtcaaggagttacatgacaatggacagaaatatcttattattatggtatgttcaaacacttgttaccttattttttcctttgtagtgcaaaaaatttatgaaaataatatttatatcgtatttctttattagaatcctggcatctccaaaaactctaactacgagccctataataatggaagcctaaagagagtgtggatcttggggagcaatggctttgctgttggggaggtaatttcttaagaaaatcaaagtaaattatgattgttttggggagttgtacttttggtacgaagatgagtgaaaggcaagttacaatattgttactgttttcatggctttagaggtttcttttattactattttaaaccagtagatataataatagaatgattaaaaacctgaagaatttaaaaagctagccttgatcctctaataccatagataattgagaagcaatatataactagaagaaaaatcagttacctaaagccctcccacctccaaatttctctttcccaagacaataaattcaactacaaaaatatagcaagatgctcatagattaatgtggaactgatctcagctaatatattttattttttttaagttttaatttttatttttttgagatggagtttcacttttgtcaccctggctgagtgtaatggcatgatcttgactcactgcaacctctgactcctgggttcaagtgattctcctacctcagcctcccgagtagctgggattacaggcacacgccaccatgcctgactaatttttgtatttttagtagagacggggtttctccatattggccaggttgatctcgaactcctgacctcaggtgatttgcctgcctcagcctcccaaactgctgggattacaggtgtgagccaccatgcctaacctatattttaaatttacacaagacttatagatagagcatagttttgattctgaggtagcagactcaggcagtggaataggctgagctggggcctatattcaggataattaaatttctgagagtactttaaatcaaatcacataggcaatttcaattatatgtagggtcagccctagatgattggattctgtaagatttactcaaattgttgcttcatctagagagttcacgtgactgcagatcttgttgctcctgagtagtttattttgcraaactgtcttttcagggttatggatgatcccttaccaaaatctgcccacttaattcctttcattgactctttcgatgcttaattctatttacttttttttcattgattctaacttttcatgaagcagtaggaaagttttcttccttctgcacaccaagtctttgcttttactgtttcgttagaagctagtttctaaaatattagataagcccatatttatatactgcatttagagtccatagtcaaataaaaattattttgctcacctaaaattttatccacacttatgagtcatttcaatagtactcatatttgagtgatatataattaagaatttgcatataattacaaagaatgaattagatagttgacttcattgaccaataaatggcatgaatcatttaatctaagatgttggcagagatagcagtagtggaggtgcatagtggtgtgtgttttttttttttttttttttttttgagatggagtcttgctctgttgcccaggctagagtgcagtggcacgatctcagctcactgcaacgatctcagctcactgcaacctctgcctcccaggttcaagcgattctcctgccttagcctcccaggtagctggaattacaggtgcctgccaccatgcctggctgatttttgtatttttagtagagacggaatttcactctctcggccagactggtctcgaactcctgacctcgtgatccacctgcctcagcctcccaaagtgttgggattacaggcgtgagccaccatgccagtccagtggtttgttttaaatgcacttagttgaataaaatttgctggctcgctctaggttgaatgttgctgtaggtgactgttttgtgacaccacctgtttcctggggtgcagagttaacatctaattgttagttgatgcccatcgcctaaaacaaagagccaggagctcaatccatttactgtgggtatttcaagctcccatcttgagttttgagaagtatccacatttcaaaatatgtattcattatgttcccggagtgtaaagttgttcctaaattacaatctataaatttatagggaaaatgagcaaaaattttttacaaaaactggtatccttttaattaagaattttcaaaaatttggctatggttatatctttgttgtggacaatctttaaagctattgtttgataggcatagacagaaaagggaggtagaatttaaaaaatgacctgagtaagaagcgcaaacttcattcaaccatttataaaatattgcttatatgccaaaaatatcaacacattatttataatcatacttattcaaagtagactttatgtgacctttaattaacaacacttgaaaaaagttcattctcttgaaaaataatatatagactttctagtattttaaacaatttgtctcccaactggcctgacataatgcagttgtactttttaaattttcttttgcacagaaaaggacttatggtggcttttcattgatctactctgttgcttttccttttattgttttttcctcttgttccttgtatgcattttattgtttagtttttgttggggtagtcacacattttatttctaaaatgacagcaaaatgaggctcctagtagaagaaatcactgtcggtcaaaatgaaaaaccttcaaccaagctgattgccactgccttcctctgtgtcctagggatatccgggaccgacagtctttcccgattataccaatccagtatgcactgagtggtggacagatcaggtcgctaaatttcatgatcatctggagtttgatggagtgtggattgtaagttattattcctgactcaaatttcctttggaaacagataacgccaaattttcagatgagttttgaccttgatgtcaaataaatgtcaataaaaaatagtttgctttatgtagtagtattcaaaattattttacttaaggctgagtctatatccagtgaattaggctcctaagagccttaggttcttatcctgcatctttcatcaactggttatttcattttgataaagtttttgctttctccattaactggttgtcagcttaaaaatactgttttattaaaacagtattataattgctactatttgtagcattgattcataaaaatttaaattaatcattagagaataatttaatgagggtctcgtatttttatggaagaacaataggaatttcttcaacaaatgttctctgagtgccaatgtgcaaggcattggagcagccatttgggaagcactctgatgaataagatgtgcaatgataaagaatatttgtttgttgccaagattagacatcacttatttttaattcatgtaagaaaatagatttgatcttaattatattctcttactgttcctcactcagaggaataaaggatagggacagttaacaatagaaatgttagtttatcttaggttcttaacaataacaataaatatttacaatttgtaaggcaaggatcaacctttgaaatggtatttctgaattagctgattgaaatcaatttataaaaagtaaaaatgtgcccactgtcatttagaagtggaacataccttaaaaatatataacctaatccaatgactcaattttataaaagatgaaacacagggtaagaaaaattagggagattatttaaaatccaaaaagcagttgataagggacccagatatcctggctcctagttcagtaagcgtttctcaacagctaaatgtagctcaatcgcattttacactttgtgtgttttgtgtctttgaaggaaatgaatgaagtatctagcttactccaagcttctaataaccagtgtgaatccaacaacttgaactttcctccttttcttcctagtaagttttcacctgtttgctatgacgtaggaataagccatgtttaaaacaccctcagtaatactcagtgtggtcgggagcaatttcacttcctagtccaaggggtctcctaaacatcctgagcactcctctgccgaagtctctgcagcagtgttgggtctctgattacccttttgctgtcataactccagggcaagcatgtgacaaagtctgagcctgcctacctcccctggctgcccttccagtctagaattcaaaatgctttcatcctgttcatttcccccaaatccctcaggtgtcaattttaaaatctatgagaatttcaggacacttcaggatacagactaccttaaactgaagtaaacctgtaatcttcttaactgttttctttattctttacttccttctttcctccttaccctcccttccttccttcttccctttttcctttttcttttttccctcccttcctccctctctctctgatcatttacaacagtttaaagcatcagtggtgccttcaaggtcccatttataggtcccatttctagtcaaggtcaattttccagtttctgattttgaaagaatatgtgtggaggtggcgggtggcagtggcagtatagaatacactwtgctctggcaacatataaaccccaatatctcagtggattaacacaataatcgtttactttttgctcacatcatactctgatgagggatgggtgacttgaatccaagtggtgactcggatctatgtctggttctcccatctcctcagagacctttgtttctggcttcctgggtgagggagagagagggtggagaagattttatgcgcaggcctagaaggaaggtgtacccaattggcccacatttctttgctagaatctggtcatgtagcctcagcttaacctcaagggaaggtataatcttcttatatttccagaaagagaacactgacatgttgggcacccgaacagtcagtgtattctgatttgcccactttacttatacccctgagaccaaggtacagctgtttctttaactccttttggtcacttaaggagtaaataattttttggaggaagtctttacctcttgcaacatctactgtttgctttttcgacttactctttgttcttctctgctctgtctggattcccccattttttttccactctggattagtttatcatgttttttttttttttttttcttaatttctcaatcctctttttggccaaaactaaattttgtttttgattttttttttccctatggaaaacctcaatcctatcactttctgcttgcttgtggtggacacggccacttttgctcatagccaggcagcccctcccctttccaggattgcatagtgcacattaattagcatgagaaagagcactgaagtggttgtgaatctcatgccacacaccaagctgtgcaagaaatagaattttcttcccatcttacatttcaacttaatttccagctccaaaccttgattctgttatactgcgtaggaaaaactcaacctcagtctttcctggtcccaccactttctggaattgtgcctcacactcaggtcctaggtatgggcaagactttgtgaaggaaggtagatacggccccagtgaagagttcacaaggagaggaagtggcagagaagactggccatttcaggcttgaggaagggaaaatgcaaacaataattctcagaggtaggatttgagtacttacacatcaaactgtcaaactacccaaatgtccaaatgtcacatcttattttttttttttttgagatgtagtctcgctctgtcacccagtctggagtgcagtggcacgatctcggctcattgccacctccgcctccygggctcaagtgattctcctgcctcagcctcccaagtagctgggactgtaggcgcacaccaccatgcctggctaatttttgtaattttagtaaagacggggtttcaccatatyggtcaggcttgtcttgagctcttgacctcaggtgatccacctgcctcggcctcccaaagtgctgggattacaggtatgagccactgtgcccagcctctatttttcttttaagtgtgactgtattataaaaaagaaaaagttccctttctctgccttcatacctatacattgyacactcaatttctcttgattaaatttatgtagataaacactatatgctttatacttaggctcagatccactgcgtttgctctgagcatgtttctcagttgcctcccctcaccaggattctttgtgagctcaagggaatgcagattaattttaataatccatctccttggaggtctcaatgttagccccaggcaggaaatagcatttaggatagaatttaaaatctggaatggatttggtcaggtggagattggtggggaaggtacagtaatcaggaagaaaatagttgggccgctaatttgttaaagatggttaatgaggaagtgcctcactaatgagtatttccctccaggagttctggatcacttactttttgcaagaactctctgcatggacacggagtttcatgggggccttcattatgacatccacagcttgtatggccactccatggcaagaaccacaaacttgtaaggacttggttttcaccctaattccagatatgtggaggtgggaggtggaggtggaggtttttcttctgttctatatgtaatatattgttcaaatattttttgcatttatagaaatagaaaaactgttcttacagagtatttaagagttcctctcatatacaccctggtttctgtacaggattatctttgattagcttatggctaaggagcttatttcaaggatactagcaggcaatactatgtaaggcatttagagtcctcagctagaagtcagctcttgcttggatccttttactgaatgcactaggattgcttgattttagcaaataaaaatacargacaccaaattaarttygtgtgggacattctcatactaaaaattacttgttgtttatttggaatttgratttacctgtatttcctttatttatctggaaatgctacaccatatccttctatttccttcccaatgtcctgcttgtctacctcataattctcccttctgccctaagacacacacacatgcacacacacgtgcacacacaactatcaccatcaccaccaccattacctaacaccatcaccattgtcataaccacaccattactaccaccattattgccatcaccaccaccatcactaccactactatcaccatcaccaccaccacagttatcaccaccatcccccccaccaccacaatcactatcaccatcaccaccacccaccatgaccaccattcaccatcaccatcataaccgctaccactaccatcaccaccaccactaccatgaccaccaccaccatccctaccaccaccatcaccatcatcactatccccatcaccaccatgactatcaccatcacctttactgctgttgccaccaccacccattatgaaagtctaccaaggagacaaatgtgttctgcaaatcataacatcctttatatcttgtcatgtagattgtttacttgtgacttagtaaattgagaaataactcctcttctcactgtgtagtttcttctgtggaagatggtacaatacaatcattatacctaagagagcaagaaaatttggggccaggcttaagattttaatttgaatttgcagcacagatgcggaaactaaagagctgctgtggatcctccagtggcttaggaaagagcatctttgtctttctcggcttctttccccctgttttggtgtttctagagcactgttgtgctctacaagrcagggagactttgatgggtttatggggcctgtctcagtccttttcttacttgacttctctttctccttggtactcaaggccataaccactcctttaaacttagctccttcagtccttaagatactgctctgctggcttggtgcggtggcttacgtctgtaatccaagcactttgggaggctgaggtgggcagatcacctgagttcaggagtttgagaccagcctggccatcatagtgaaacctcgtctttactaaaaatagaaaaattagtcgggtgtggtggcaggcgcacctgtaatcccagctattttggaggctgaggcaggaggatcgcttgaacccgggagacggaggttgcagtgagccgagatcacgctattgcactccagcctgggcaacaagagtgaaactccgtctcaaaaaaaaaataaaaaaagatactkctctgcctggtgcctctgctctctttccagctgttccctctcatctgtgtgcctggatcttttccatcagctctttcactattgatgattcttaggaatccatcctctggcctcttctctttacagtctatgccaacacataggtaatttataagtaatttatttcttttcatggttttcactgtaattaattctaatgattttaaaatctataattatamctgagatgtttccctaatttttagacacaaatatccaaaacaatcttctgacgttgtctacttggatgttttgttttttttttgagacggagtctcgctctgtcgcccaggctggagtgcagtggtgcgatctcggctcactgcaagctccgcctccygggttcaygccattctcctgcctcagcctcccaagtagctgggactacaggcagctgccaccacgcccggctaattgtttgtattttttagtagagacggggtttcacagcgttagccaggatggtctccatctcctgacctcatgattcacccgccttggcctcccaaagtgctgggattacaggcgtgagccaccgcgcccggccttacttggatgttttgtagtacctcaaatagcattcaccttgctctgttacctgttttcacctaatcttcccactgtagctgatcatttttgaagctgttaaattcttttttttttttgagacagagtttcgctcttgttgcccaggctggagtgcaatggcgcgatctcagcacaatgaaacctccgcctcccgggttcaagcgattttcctgcctcaggctcctgagtagctgggattacaggcatgcgccaccacgcccagctaattttgtatttttagtagagacggggtttctccatgttggtcaggctagtctcaaactcccgacctctggtgatccgcccacctcggcttcccaaagtgctggaattgcaggcatgagccaccacgcctggctgaaactcttaaattctgtatcttggttggtagcaacagcatccctatatcccagactctcaagtgagaagcatgaagccatcttttatgccttttgtgccctcacatacgatcagtccttgatccttttgatgttacttttgaaacatttctgtaaccacctccattttccccccttaatacttcttaattaggttatcatcatccctcacacaaatcattacactaggcccagaactaatctccctgactttacccttatctcccagtaacctaccctctaccctttctacttgaagcatagtccaaggaacagctgcatcagcatcaccagaaaacattagcatcttggacctcaaccctgaacttagtaatcaaaacctgcattttatcaagatccctgggtgtattgaacgtatgttaaaatctagaaagcactgctgtacattcctgagaaagtgacctttctaaagcactgtttgctcatttctctccccagtgtaaaattatttgtgccttgctattttttatacagtgaaattcttagcataacctataaggtactttataatcgaaccctttcttacaatttttctctcacctttgcatcttcttgttcccaaatccaagtgctattcattcttccatgcctttcatgtgctatttgccgtgcacaagatggccttccttaccctgtccattttgcaaaatatgcttatctataaaacctcacctccaatctcaatgctgggaactttcctgacagttctaggaaaagattatttcccattttctgtgccacatttgttcatattccaatatgcttagtatgcaaaaaacatggtatcaaattttagatgctaattttctctctgctggactgtaagctttttgagggcaaagtcagcccatatccttagccttatcaatagagtgtgtactgaagacactttgttggataaatgcctggcctgagagagagaggaagggcaggacccagcacctaggggacctgatgacttcgaggcagagactgggtcggtgttattttccagcactattttgtcctcatgactttgcattacattagattatccagatgagagttcttgtccagaaaatgtaaaagtttgtattttggttaaaaaaagaaaacctctaggaagaatgacatatatttctgattcattatcttctctttgtcttttctctctcattctatttttcctgagaaataaactggataaataagactcaatttcctcatctctgaaatgagactcggattggtattcccataatctcctgttctgatatagttttattcttagatgcttctatctaagaatgagaaatgggaaacagagtgagtagtcagggtaagaaagagtaagaaagggttggaggaggggaagaaagtttcaaattacttttttgcccgtgactccatgtggtaaaagtgctataaatcaagaatgggttggttaatatattctaatarttatggttaatagttaaaaggtaattgtgattgagcaaatagtaggtgtctttctaatttctctggccaggcataatggcctacgctcccagaggacagtggagataagtggaacttggtctttgggcatgaggcagagtggatcaaaaaatggataacattttcattcaatgggatctggacatcagaagaactaaagtaattggtctgataaatatttggctcaaccttaaatggaagtatagtctggggacagtgggccaaccaggaataaaattatccccacctctaggctgaaagccgaaggagactagagtctttcagtgatcacaacctgattataaattggccagacctgggggatagaaaagagaaaactaaaagacagaaaatacaaagcctctgagtaagactgttcctttaagatgtttaaaaaaaaaaaaaacccagcagttatctaatctgttttaccacagtaccagcctgcctctaaataaactggaaccacagatatcttcaaccctgttttggtttcactctgtgtaagctgaatgtgtttctttcatgattgattactgcagagtataataaacctgcagccagtggtrataaaagcaaagtgtcggccagtctacattaaagtagaagtggggataggagttgagtgagtcctctcctccaacctacccctatttttgacagtaaattgtcagaatgaagccctttactttcttaaagcagttttccgtttcaaaattttctcccttttgccattataagccattcagtatttatagactctccaaacttcccaggaaaatgaagtgaggaggccttggtgactgtgatagtgtattgaggaattgcctggtgcctggtgataaagacttgcagagagaggttttaggaaaagatacacttgtctcagaccatgtattagaaagcgggaaagaagagcttgcctgcgaagagctggcagaaactgtggmgtggctcaggtcttactgtcctttaattgtattattgttcaattttataattctaatggaagatgtgggctttttaccacaggggggaaaaaagaaaagaggagagtcatttcaataaaatgcctattcaaaaggtgtccagaataaaagctaggcaaacagcccacatccaaccataggtcaccccactgtatgttcatctgtgcccctgaagtaattaccattctgaattctgtgcttttaatttctttgcttttattcctttttttttttttttttgtctgagacagagccttgctctgtcgcccaggctggagtgcagtggcacgatcttggctcactgcaacctctgcctcttgggttcaaacgattctgctgcctcagtcttctgagtatgagtagctggagctacaggcgcacaccaccatgtccagctaacttctgtatttttagtagagatggggtttcaccatgttggccaggttggtctcgatctcctgacctcgtgatccacccgcctcagcctcccaaagtgctgggattataggcgtgagccaccgcgcccggcctgctttcatttctatattgttttacgtaacatgtaatattttatttataatacaatgaaaataatattttctatgttagttgtttttaactttatagaaagtatcagatgcgatcttttgagacttactcatttcaatgactcttattttgcrtagattaaaatttgctaacattgagaattgctaagaataagtctgaagtttcagaggaagccagggataagttctgaagtttcagaggtgtaccagctggtgcatgaactctcctcttagtccagcagagggtgcagagctcccatcggagcaggtgctgtgctgtacaggattatgcatggcagaaattcatggaaccaaaggacattagaaaaaagatgggacaaggaactcaaatcatggttccaatatactgttgaccaaaaggaccagaccacaaccagatccaactagacagagaaaacaaaatcggggaacggaagcctagagaaattgctatgggggctagaatataraggtttgtactgtcttatatgagatctgaaatcttaccccaaaatgggaaagaagctcttagatagtactaagtttatgacacctggtttatgacaccctcatgttgttttctcagtttggttagaaagtccattgctgctcttattgtaaggtgagtcctagacattcacagcccacctcacactccactggatgtattcctttccagagccctggagaccatcttcatgaataataggagcttcatcttatcccgttctacttttgctggatctggcaaatttgctgctcattggctgggggacaatgcggccacatgggatgacctccgatggtctatccccactatccttgagttcaacctgtttggcatccccatggtgagccttatttccaaccagggaactttaaccctttgtctgttgacattcttttaattagcagtcttagagattatctgaaaaaccaaggatcatgttccaaggtgatatgtattggaaagatcaatttttatgtgttacgtgagctgccttctgaagatagaatggtagtactttatcactgagttgtcatccatggaatctctgaagataggaaggagacagcatgaataaaatgtattagtatcacaggaaaattccatcaagagagcattagtaaataagaaagtatgaaattgggaactgaatattaaggaacagcctcaacacaaggaccattgtttgcactatcagtaagtccgtgatggattctatcttgtttctctcctttggctgggagtgtgccctgtgactctgggatctccttaagcatgggatgatgtgacwaagaggttctcttttcccttatcatataaatcttcactacatgctttcgcctctcattgaccacagtgcttgtatgtgtgctaattctccaggtaggtgccaacatctgtggttataacaacaatgtcacagaggagctctgcagaaggtggatgcagcttggagcattttatccactaccaaggaatcacaatgggcctgggttcagggtaaggtcaccaaaagaagtgatggaaactttttggattagctaatctactggctcttaaaggggatttgaggaaaatagtactacaggttggcactaactgcagcagaaggataaaaaagtcttgtatcatagccttaaaaagcagggtatcaatcaaggtgagggtgcattggaagggatatgtatatactgaaagattttattcttggaaactcaccaacaaagtgagaagatttgttaaagtttctatggtgctgccatgacttctgttctatcctatataggataggacaattggaatttgttggtattttatttcagttaatacaagggaaatccctcataggtatggaggaacaaggagaaagaatttaaagaggcttaggccagtgatctcaacatttctttccccttgttacaacattctacctttctatgaagagtttggaggacttgccaactacttctcatgactcattccacctttaggctcgtctacccaaaatagtattttcgatgggcaagtacatggaagtgggttcaaaktcccccctaaggaggtgtttatgatggtagcagaagcaagtagggtgagatgtcctttcttttaataaagtaatcttaagttgaaatatttccaattgagtggtttagctcttaataggttcattagaataacttcctaatgataattttagctccaaytcttgactttgtctttaacccaggaaggattaacagtcaaaccttcaaagtattttatccctgggcttttctggccacttgtgatctagagagagatgaactatttctaaatgtcttaagcaggtggctgggagcaggtgggtgggtgctcttcatgaagctgtgtcctggaagacttacataggtaagaacactcagataacccaggaagctaggtttaagcacgtatgtccttttgattaaactagctctattcaataaaattataaggagagccacatatgtcagtttaaatttgaaaagtacaaaaaggctgggcacggtggctcacacctgtaatcccagcactttgggaggccaaggtgggaggatcacctgargtccggagtttgagaccagcctgaccaacatggagaaactctatctctactaaaaatacaaaattagctgggtgtggtggcgcatgcctgtaatcccagctacttgggaggctgaggcaggagaatctcttgaaccggggaggcagaggttgtggtgtgctgggatcgcgccattgcacttcagcctgggcaacgagagcaaaattccgtctcaaaacaaaacaaaaaaaaaaacaaagtacaaagaaacagggacattgttttaaaaatactttatatagctcaatgtgtatctatatgtgtgtgtgtgtctgtatattacatagcattatcatttcaacctgtgtttaatacaaaatattattaatgagctattttatatccttttcattctactaggtcttcaaaatttggtatgcattttacacttgtagcatatcgcaatttgtatgctaagattttttgtatgcagttgaagtaaaatgcaattctaccaaagcaataaagttggtttaatggaaaaaaaatttacgttgattcagttttaagatttatatttaaagtaactatcatcaaataaaatggaaagtttacttcctcagtctcaataaacatagttcaagtgttcaatagcttcatgtggttcatggccaccatagtggacagcacagctctgggcttttgtcagttgacaaccagggtgatggaggctgtggagtgttactctctttaatgtttggcctcagagttttcatgagccctacactgggtgcatagagtggtctcatggagtcattctatttagagggggagaaatgggcctcttagggagcaaaagaaaaaaaagttcaggtaactttatccaaaactcagtctcagtaacgcagtataggatgacaagtcaaaagatgacgtgtatgtctttcacatcttccaaattacatggaaaatgaacaaaatgaatgccgaccattgacggaaaattttcatctctgggtccatggaaaattagatttttcttctaaygggttatttttttactcttggataaaatctgctaaaaaccatcgtcataatttatttgcacaatgtatgtcaaagaacaaatagaggtcactaatctttgggatagggaaaataaaacaaatgttgatggtggaaacattacagataaaactggacaaaaaatgttaaaattaaaattcatacaagcacatggaaaggaaatgatggattacagaccatggtggcaggcaatgtggcttataaggcaatggatttttttttagtagtagtacaacttatattatttcccaaataaaatatgagaaacctcaatatgtaaaataaattggagcaaccctggagggagcaagtcccactttatctccatggcaacccctgtgggacttccatttcactctggggctgctacaaactgcctcagaagacagacaccaatttttttttttttttttgagacagagtctcattctgttgccagtttggagtgcagtggcacgatctcagctcactgcaacctccaactccctggttcaagcrattctcctgcctcagcctcccgagtagctggaattacaggcacgtgccaccacacccagctaatttttgtatttttagtagagacaggatttcaccatgttggccaggatggtctccatctcctgacctcgtgatctgcctggctcggcctcccaaagtgctaggattacaggtgtgagccattgcgcctggccgatagacaccaaatttaaactctgccacttgtttgcaattctacattgggaaagtcatataatccttgatattgttttctcatgtataaaatgaaggagtaggattagtatcttttcagttctagaaatgctttgatattctccaagttggaggaagtggctagtttcatctgggaaacttattgtaagagaacttctgaactatgatggaaagaaatattcagccattccttccattttctcctaggaccaggatcccgctgcctttggtgttgattccctgctgctgaaatcctccagacattatctgaacatccgctacaccttgctgccctatctctatacccttttctaccgtgctcacacccggggagagacggtagcaaggccccttgtacatgagtgagtttcctgattctcaaagactccctttctgattgtagtttcacttgactttgtttgtggtagcaaggttagttaggatcttgttgttacgtaatgtgccattgtcctgtattagagacttcacctgccttcactgtgctacctctttactaggttctaccaggactcagccacgtgggatgtgcatgagcagttcttatggggacctggactcctcatcacgcctgttttatatgaagtatgtttatcatctaaacaatgaaagggggtattgcacttgtcctcatggttctatagctggataagttggttcctatctatgactgcatttatatcaaaatatgaatataaatgagagagctcatgaaagtttagaaattttttaaaaagtagtaaatcttggtcccattgccccaccaaacaaaacaattttcatgttgtaaaattgccttaaaattaaagcctaagtccttaggcatatggctgcagcattgacaatggctttaaatactttggggtgtatgtgctgaacatctgtctatagtttcctttgtccagagcgggtgtgctcttggattgggttaggctgggctgcgaagagagaatacctgtggagaagaaaagggagggagagaggagtgctgggcaaagggaaggcgatgctctgaagtccaactatgaaggaccatgtgtatcctattaagtgtgattgggagcaggggtaagtggcaaagtgtgggacaaggatcaggaaggattatgctgatctgcttgtaaacatgaaatattgccartgtagccatgtcaaaggccctttgagctgttgttatagccacactatctgatgacaggtcctgctaaccaaccagtggccctgctgggaggctttcctggggcctggctggctcactgtcctcccaactgtcaaattatgtgactaactcagtgaatggactttctctgcttctcttagaaagtgcagcagcattgagcaaaacaaatcatttttagctacattctgctttgggtaaattgctcaacctttatgtgtctgtgttttcctttgtagaatgggatgatctcaaccatctctcaggattgttcagataggcacatgtaatgatgcctggaggtgttttgtaaactgtagagaggggtatgctaatgctactcattattgttgtttacctagggtgtggacgaagtgaaagcatacatacctgatgccacctggtatgactatgagacagtaagtaaggcagccctggttggctcacagacctgcctctagcagagggcaattctaaagcagcagtcttgggagcttgccatagaataatagtacaagatttatagttagttgattgtggtcctttttctgtgagaaaggcatcttagttggttcaggatggtgcaacaaaacaccttacactgggtaatttataaacaacacaaatttattgctcacggttttggaggctggcaagtccaagatcaaggtgctggcagattccgtgtctggtgaaggccctctctgcttcactgatggcacctccttgctcctccctcatgacttaatcacctcacaaaagtctycccaccccttaatactatcactctgggtattaagtttcaacatataaattttgagggtacaccagcattcagaccatagcagaaggcctttccaaatgtacaatgaaataatttgaataactggagtaggtttatggaaattcattatatcaacctggctattgtgtagctatcaagactgggctttgtcatttggctgtggtagcctagcaattgaagcccaggtgtggaatgacagcttgatgtaatgtaaataaataaaggggattggagtgtcagctctgccctctactacccatatgctttcagcaagtcacttcactttggggttctctgtttgtctcttctttaaaatatgtcaactgaatgagatgatacctaaggcccctcctagctgaaacagcttattacctgatctatcttttgttgttgttgctgattagggagtggccatctcatggaggaaacagttggtgaatatgcttctcccaggtgacaagataggacttcatctgcgagggggctacatatttcccactcagaagccaaacacaaccacagaagccaggtaagctccttactcttctaaggtatgactattctggtgctctaatggagcagggcattatgagaaagacaaatagggatttttgtggatgagccaagggataagtcacccatcagtaatcttcccccactcctttcaaaattgatccaaaattggcatcttagtccctatttagtagatggtagtctgctaaggacatctgcagagtgtttcactttgggattgaatcagattataggactagtcaaagtaatcactgaggaggatttccctatggccagaaattgtccttaggtatattccctaccgtgtgagagaatttgagttaaataggagataaakgttatcacgtggaagccaacaccgtttgggggtcaagagctcagattctacagaacctgggttcaagccttggtttgggctacatactagatgtgtttaccttgggtaacttacttctctgtgcttctgcttattattggtaaactggagatgatgatagtttaactttgtagagttattatgagggttaaatgaattaatataaatgataatgtgtgcgggacacttagaagagtgcctggcacatggtaaacacctaatgaggctaattgttggtattatgtattgcaacccaaacagttgcctgtaggaactgcctctgtccacccttccctttatgtccactcactatcaacccctgctgcctgcccacacccagctcccatgtgtccacccaatatcaacatctactcagtttctggtatagactcttggattatctgtccctgggggatgaaggyggctggtttcacatagttccatctcatctacattctctgaaactgggaagtactcttttacagccggaggaattccctgggactcatcatcgccttggactataagagagaagcaaagggggagctgtactgggatgacggtgtatctaaaggtagactttctcaaggcaccatccctgtggatcactgtggttctccctgaaaattagtmatcataggctgcccaatatggcactaaccctattagcactgtcgtttacatctgtagctgagaatcaacgggttaaaatccattctgaaaattccattagccaggcacaatgcattaaaatagacttcaaatgcacaaattatgtgttactgactctaccaargcaactggcattattkcatttagcttaattattctcttccttggatattaattattaataacagataatacactttttaatagctttggaaaatactgctttggtttgtggaagaaatatctaatttgtattgtatgtcttttcactgtaaggtttccatgtaaacacctcacatgaacttatgtgattatataaaaatcctgtcctacatggaattagtatgtattgtgtagrccttgaggaactcatgatccagcaggatagatacaatgcacacatagataaatacaatgcaaatcaaaatgttttacatgccagcgaaatggtaccacagactgacatgtgaatttagagaaaatggtccaggaaatatttgcagaagtttgaaaaaaatgcacagaactcagatgagcagaactagatggttggtaaaggaattccagatgaaatgaagagaagagcaggactccctggctgattggcttcccatagtaaccggtactcctctttcttttttagatgctgtgactgaaaagaagtatattctatatgatttctctgttacctctgtaagtattttgtttgaggaacacacagcatatgttccttgctgggaaggctctttgagtttttagtttaatatagacacatggttatgtgcagcagagacagggttttactgtcatgattccaaaaaggaatcaaatgaacatgaaagtgtttaatgtgtgtcaggcttataagctgctacaaaaccagtatgagttctgtgcagaactttttttttcctggaaaaaaaaacattacctttgagttttatgtgatgggtgctggcttccaagatgtgccttttttgaggtttgcaagtgtatatgaggtgtgagtgggttagtgagtggtatggcacatttttaaggttcttccataatggctgtcctttgtagcacgtaaaacttggcctttggcacgggtataaagtagcggcttttaaaggctggaagatacagaacatcacttgcctcatatctatttcccaaggggactgagagaagaaaaagcagcaaggccagcagaaaatgagggaattctgacttgattttcttagaagcctgatcatatatgggcagaactttcttttgaggcggtctctctctctttcttttttctcctttcttttaaatgtgtatatatgtatctgtacctatacatataaaaatggatctactttaagatatagaatatatataatttatatataaggtataaaaaatatatatcttaaagtaactcttttattttgagataattaaagatccccatgcaattgtaagaactagcacagagttcccatatacccctttgcccagtttctcctatggtaacatcttataaacctatagcacaatttcacaagcagaatgccggcattgatgctatcgagatacagaatatttcattagcacaaagatctttcctgctgccctttaatagcatgtccacttgcttcttccccaatccctcctcagcccctggcaaccaatcatctgttcgccatttctataattttgtcctttcaacagtgttctgtaaagagaactaaactgcttgcaacctttgggattggctttttcattcagcatagttccctcaaaacccatccaagttgtgtgtgacaacagcttgctccttttcattgctgagtggtgttccaagttatggaaccttttaaaaatcactcacttgattaatagtatctgggatggctccagtcatgagctgttacaaataaattaaaattgctactaacactcatgtataggttttggtgtgaacataagtttgtttttttgttttgttttgctttgagagggagtctcactgtgttgcccaggctggagtgcaagggcacgatctcagcccactgcaacctccgcctcctgcgttcaagagattctcttacctgagcctcctgagtagctgggattacaggcatgcaccaccatgcccggctaatttttgtatttttagtacagatgaggtttcaccgtgttggtcaggctggtctcgaactcctgacctcatgatccgcccgcctcaccttcccaaagtgctggggttacaggcgtgagccaccgtgcctggccataagtttttatttctctttaataagtgcctaagagtgcagttgctgggtcttatggtaatgcatgtttagttttataataatcttccaaactgttttccagaatggctgtaccattttcacttccaccagcaacatatgagtgatctaatttctttgcatcatggccagcatctgatgttgtcactatttttttaggcttttctgattggtgtgtagttacagctcattgtgtttttaatttgtatttctctgatggctaatgatgtttaacatcttttcatatgtctatttaccatctatatatttacatttttaattttgatgaatctaatttatcattattttccttatagattgtgctttttgatgtcaagcttaagatctcttcgccaagtcctagattctgaatattatctcccatttaaaaaaatatagtcttaccttttacatttaagtcgtgatctattttgagttaatttttatataatatgtaagatttaggttggggttcaacctttgacctgtgtatgtccagttgccccagcacctttgttgaaaaaaatctgtctttgtaaaaaatcatttgggcatatatgtatgcgacttctaattttttaagttatcaaactgctacttttttcttcagtcttaatttctaccttcttctttgtcatagctcaactgtgtcacctttgttccctaaataagttatttaattttctgtgtttcagtctcctcatctgaaaaacgagggtaattatagcttcaacctcatagcctgccgtgaaaactgaatgaagtaatacatgtcaaatgcttagcacagtgcctgtcacataatacacactcagattattcttagctcttatcatcattattagtaaaataaaaggaagaaaattacttgggcccttttggtgtatatgtgtatgtctttatctttgtgtgccaatgaggctcttatctttttgtttactgtgtgagtacctatctcgtctgcttgaaaattctacagtgtcagggacgtattttccgattaatagaatcagtaaagaaccagtgaacaaaagcaaagatgaaatattacttaaaaatttaagattgataagagtctgagtgaacgagttccctagggatgatgacctagcaacatttgaaactgcagagaaaaggaaacagcttggatcacagaaattgagacattgactggtatttggggataataagggtctgaagtacctggtttccaatctgacttttttttcccctcccagaaccatctacaagcaaagattataaataataattatatggacactgacaacctcatgttcacagatatcacaatcttgggaatggacaaacagccagctaattttatcgtcctactgaataatgttgccacctccagtccaagcgttgtctacaatgcttccacaaaggtaagagatccttccattctgcagggccctttccagaggccttggctctgacagccagccctactttgctcttttaactgtgggcagtcagacacaactgacttgctgggaggtccaacacatcacagaaaggatgcaggagaaacgtgtgcatgctaaagaaagacctctctgctttgtttgtatcagggctctgaagaaaatagcgggagtcggaacccygagagaaggaagttcttctctgggcgcagttaaaatgagacactctgatcccagctgtgacatagtgaatagattgtgcaatgggtatttacacattggtcctctcattgaagggagaatctctttgagaaacagttgatatttgtccttaccgttttaggctattttcataccattaataaaatgtgagtggagtaacgcaaggagaaatccagttttgctcttactgaatgattcccttacactgttagttgaatatttcaagttctgggaaatttgttatttcttagatcagcccccttccatgttgacaagacctatagcatagaataagagtttgatttctagagttaggcagaatggggctccaatctcagctcttagggtattaggtgtctctgtatcttagttttctgttctgtaaaatggagatagtcaaaacattcacagcatggaactgctgtctaggattaatggagatcatgcttataaagtggttatcacagtgcttggcttgtatgaatgctccataaactttagctattgttgttattactacttttattaaattggtaagcatcacacccagaggacagtaagcctaaccatgacagtcctgcctgtgatctgcactcattagcatgatgaaaactctkcccatccaacacttccacaatgactccatgaagtgagaaaacccaggaatcagccaagttctgaatatctcatggcaaaatggttttggaggaaggaatagatgcccttgtcctgacttccagacttccagccaagaactctttctgggtggctttccctcccttcctttgtcactgtgactgtctctttccccaggtggtaaccatcactgatctccaaggactggtactgggacaagaattctctattaggtggaatcttcctgtcagtgacctggagaagttcaactgctaccctgatgatccaacagcctctgaggagagttgtaggcagcgggggtgtctttgggaggtaaatgaccagaaacagattacctcattgattaggaagtaattaggcacctagaaaacacttttcaaatgtctgtggcttgaagaaaaccaggaccctgtgcaacacgccttttgccaactctacatgataggtcatcagtattttcctcagacatcccaaatcagaagaaacttattgccattctcattgccactccaaccatatcattaaaaacccaattttaaacataataatgtacattgggtatgcattatgcattgtctattttaaccaatcttgttttgtctgttggagaacacaagcaggaagggtaaggtcaggctgttcctgtctatttgaacaacagagaaaatggaaactaggaagccaagtgatttcctctagattacatgggaggcaataagaacactgggagtagaaccctgcctggaggctcctgtctccctatcaaacttcctggtgctctgtcacggttcactcattatagaaggtcagtgtgtgtgtttaaaaaaatggatgtgttcatttgctagggttaccataacagagtaccacaaactgagtggcatagaatgacaggaatttattccttcaaaattctggagtctagaagtgggatcatggtgtcagtggagctggttccttctgaggaccttgagggtatttctttgcttgtagatgcatcatcccactctctgtcttcatagtcacatgtgtacatgtctatctctgtgtccaaattttccttattaataaggataccagtaataccggatcaaggcctatcccaatgacctcatcttaatttgttcattgcagaaaccctacttccaaatagtcacatttacaggtatcaggggttaggacttaacatcttttttaggggacacaattcaacccataaccatggacatggtattagagacttagtctgtgttaaccaacttcttcagtaatgagagccttagtgttgtatcagaggctgagcaagactttctcctgttattccaggacacatctactcctggagtgcccacctgttactatgacaccatccctaattatgttgctagtgatattcagtacctgaacaccagcatcactgcagacctttccctcccgatggcccctgagtcagctgctgctgccgcctctgattctctctctgcaaagatcagcttcctccacctgaaagtgatctatcacacagcaaccatgctgcaggtcaaggtaaggcccatgttgcagattctggttctcaagatggagtttttaatttacagtgctgtatggatagaagtcattgaaacaattaaaacattttttttcttttcaagacaggatctcccactgacacccaggctggaatgcaggggcacaatctcaggtcactgtaacttccacctccctggctcaagccatcttcccacctcagcctcccaagtagccaggactataggtgtgckccgacacacctggctaatttttgtattttttgtagagacggggttttgccttgtttcccaggcggtctcaaatgtctaacctcaagcaatccacctccctctgcctcccaaagtgctggggttacaggcatgagccactgtgcctcgctgaaacagcttttcatccaaatccctcatgttatggatgagggagctaaggcctgtagagaggtaaaggtcggaaagtagacggtaaagccaggatgtggccttagatctatgaggaccatgaattccctataatgatgagtattctaggtcataaacatcatcaaagaatcatcatttagccctgagaaaaatggatctgctttgtggcaaactcacatgagaggcattaacttaattctaatattagaattattttctctagcagtagttctcaaactgcagcatgcatcagaatcaccttcagatcattttaaaacccagatttcttgccctcacccctagggtttccaattcagtagacctgggctggggcctagcctgaggatttgcatttctttctttttttttttttttgagacagagttttgctcttgttgcccaggctggagtgtagtggtgcgatcttggctcactggaacctctgcctcccgagttcaagcgattctcctgcatcagcctcccaagtaactgggattacaggcacccgcctccacgcccagctaattttttgtattttagtagagataggatttcaccatgttggccaggctggtctcgaactcctgacctcaggtaatccacccaccttggcctcccaaaatgctgggattacaggcgtgagccaccacgcccggcctcgagaatctgcatttctaacaagctcccaggtaaggctgatgctgcaggtcaagagaccaaactttgagatctaccgctatgcacatttaaaaaatacgtctactggaaacataatgtgagccacacatatcttccagtagatgcatttttaaatgtatattttaaaagggaaattaattttaataatattttaaccaatgcgctaaaatattatcatttcaccttgaaatcaaaatttaatggagttactttgccatcttctaattattctaagtcttcaaaatctggtgtatattttgcatttctagtgaatctcaattcagactagcccatgtcaggcactcaaaggccatgtgtggcttgtggacagcaccttggacagctcagctgtagccattgctttccacattttaatgtatcatgaatcactggggcagcttgtgaaaatataagttctaattcagaaaatctgggttggggcctgaggttctgcgttcctaacaagctcccaggcaatgctgctgctttgggtctaagaaacataatttccaagcaggactttagaaaaccttcacctggcaaggtgtggtggctcacrcctgtaatcccaacactatgggaggccgaggcaggtgaggtcaggagatcaaaaccatcctggccaacatggtaaaaccccgtccctactaaaatacaaaaaattagccaggcctggtggtgcgcacctgtagttctagctactcaggaggctgaagcatgggaatcacttgaacctgggtggtggagatygcagtaagccgagatcgcaccactgcactccgagctggcgacagagtgagaatccatctaaaaataaaaataaaaaaaaagaaagaagaaaaccttcacctaagcacaaatttgggactaataatatgacaaagaggatagtcactcataatgttgtaactccttgtccttccataacatttttcactccttttattcttcccacacttcagtcctgttacataagtaggaacaaggggtggatacagaagagaaactttaggaatgggaaagctgtacaacatctggaagctcaaacagtgaggagatctcagagtccatatgaaaactcaattccctaattcctaacatgcatgcacacacacacacacaaatttacacatttctatgcacatacatgtctgcatgccacacacttacaaacatatacacacacattctatttatgaaattctatccccttctatcacagattctttagaagaagagccctccttggctttgaatgggttttactgaggcaatttttgaacttcagcatctgtatggggcacagtgggcaggcaggcctcacatccattcgcttggggatgtttgatgcctactgatatggtgcaaactggtcaaaaacatggaaactgaattatatggggtggcatgaggggttttaggtctgagaccctaacagaaagttttcttctctcttcttgccagatctatgaccccactaataaaaggtatgaggttccagtaccactgaacacccctccccaaccagttggtgaccctgaaaaccgtctgtatgatgtcaggattcagaacaatccttttggaatccagattcaacgcaaaaactccagcactgtgatgtaagcactatttatttgattctaattagagtagttctagatttaattacagcagttacaattaattcaagtgaaatattaatctcagagactctatggaaataggtgtgcatttgttagagtatatctatttttcccatgctttaatggataatttgtttttggttagtcattaacaaaaataatcaatcaaagtttaaagaaatgaagtattgtttgatttcagagaaagaaaaatacatgttctacttactgttcttaagtagaacagaaaactctaataagtacagcagataacctaagatacaaatgagttccatattatgtctcattaagaaataataagaggcaggagagaggggcaaaggttaaaaaggagaaagaaatagcttcttgtaacgtttgcttctgtggacacagaagccttcaagccttttcacaatgttaagcataaaaggaattgtcatctcccatctcttgtcctgctgctgaatagaatgaagtgaaagtctggattttgcctggggtgaggttccctatcccagtagaagctgtcacctgtgtgtgcacctttgccttcctgtgtatgtcttctctcttgggctgtgtgagtgatttcctctctgttgccctctttggtaagaagtcctttggccaactcaagagaagttgttctaagagtttcatgcttttctattggaaagtttgcttaaactctatttgtttatttatatatttactcaagctgatattccaggcactgagaacttgaaataaatagaagaatgagttatggcccttgcccacaaggacccagaaaaggagctctcagtctgacaaaccacagaacagaaatctaacatggaactttggtcctgagtcagggccattgttatgacctgggtcatgtcacagtatttgaacctggatctaaatgtgcaataattaaggaggctttggaatcaactagacattccaaacacgttccaagtagctctggccagtggtctccagctcagcgtgatctgcttttgtgttgcagttgggattctcaactccctggcttcatcttcaatgacatgtttctctccatttctacgcgtctgccgtcccagtacatctatggctttggggaaactgagcacacgactttcagaagaaacatgaactggaacacatggggaatgtttgctcatgatgagccacctgcggtagggacaaaggaataagtttagcaatcagtttctctttatgtaaatctcttttaatccttatgcttatatatgataccttgctcatcaacctcatcttatattgataaattccgctctcagttgtaatagagcacgtgtcacattcttttgtccctaaaaggcatatatatatatatatatatatatatatatatatatatatatatatatatccacaactgacagagggaaatatrtatatatttccctctgtcagttatggattttatttatctcacaaacttttagttaatatattctacttgtcaggcacattgctaagtgcttatctgtacatttaataagacactgtctttgctctccagagacttataggctagtgagagaaatagacgcagaaattgtgatagcacagtggaatcactgaattatgtaataatacataattgaattatataataataaatgaggaaggcatgaagtggggaagacacagcttttaacttggagtagaagggagagtcaatgaaggcccaacaaaggacatgacattgagctgaatctttaatgatgagtaagagtttgctgtttgggttatggtatgaaaacaatatcttgcattttctttttgtttattaccctcgtgactcccagtacaagaagaattcctatggtgtccacccttactacatggcactggaggaggatggtagtgcccatggagtgctcctgctaaatagcaatgccatgggtaaggcataggcacagctcccatgcaccaccagaaacagctgtgaccgctctattttgacctggtatcaatagaaatagagacattcagggggcaagggaaatggaacaaataaactgactttccatttattcacctatttattcaagatttattaagaactctggatcaggtgttaggcatggaattttgatcagttatggctcctactctggcatagcctattttactgtgacactttggctcccattcacagagttataaaagttgttgagattgcatattacatttggggtacctgcaaatacacctctgattctaatggatgagagaagactttctagagaaggcatgtatcaaagacagagtatgaagaaagcaaatcttagagcaggttttctatctgggcaatttacaactccaaggatgtgcctcatgtgtgttgtttttcttacagatgtgacattacagcccactcctgctctgacataccgcaccacaggagggattttggacttctacattgttttggggccaacccctgaacttgtaactcagcaatacacagaggttagaagccattctgtccatcaatatattgtcaaatatttattggctattaccacattattagcactgagatagggcagttttttcttttgactcttgagtgtcactactagattattactgcctttgctgaaatcatattttagtattatggttctataaagccatattaatatcccatgtgtccctcacttgctaaacagcctaagaattgctaatcagtaataaccggcaaattctcaggtttcctagaatgaaaactctggaatacagaaaaacttcaattacgtttctatcattttgcatgtctgtagttgctccacatttrttggactttcttatctttcttgggtgaggcctcttatacagtacttagcagaaacactcaagttgattcaagtataagtcaatcaccttgtcttccctaagaaatctwtctggatgcatttttctttttattctagttgattggtcggccagcaatgattccatactgggccttgggattccatctgagtcgctatggataccagaatgatgctgaaatctccagtttgtatgatgcaatggtggcagcccagattccctatgtatgaaaccctcactcagcccaaggtgtaattagttacaggaatttgtggctaattttatattagaagtgctatgatgttcttatcaaagataacttgatacattcaggctgaattttttttctttgtatatactataatactatgtacttattaaacagaaattagaaaataggaaaattacaagatgaaaaaatccacaaatctaccttaccaaagtaatcaacgttaataatttgctggtttattcttttccaaattttggcttatgcacaagtctctgttttaccaaacaagtttcacctagggtcatatggcaatgcaggggactatccctttgggctaaaaagaagcaagttctttttttcaactaaatattaatcactttagttattattcaacaatcatggtttgagtaagtttcatgtgcagaaacctgggttggtactgcatagagagggtagacattcaagaaagctatagaataatgtagttcttgtatgttggtgtaaggaaggggtccagtttccattctacatatggctagccagttttccctgcaccatttattgaataagggagtcctttccccattgcttgtttttgtcaggtttgtagaagatcagatagttgtaggtgtatggtcttgtttctgggttctctattatttgccattgatttatgtgtctgttcttgtaccagtaccatgctgttttgattactgtagccctgtagcatagtttaaagggggatcacctgatgcctccagctttgttctttttgcttaggattgcgttggctattcgggctcatttttggttacatatatgaattttaaaatagttttctctagtttgtgaagaatgtcaatggtagattaatgggaataacattgaatctataaattgctctgggcagtatggtcattttaatgatactgattcttcctatctatgagcatgtttttccatttgtttgtatcatctctgatttctttgaacagtggtttgtagttctccttgtagagatctttcacctccctggttagctgtattcctaggtattttatttgtggcaattatgaatgggagttcatttgtggtttggctctaggcttgactgttggtggtgcatagaaatgctagagatttttgtacattgattttgtatcctgagactttgctgaagttgcttatcaggttaagaaacttttgggttgagatgatggagttttctagatataggatcttgtctatatgacaagatctagtatctagatacaggattatgtcatctgcraatatgaatagtttgacttcctcttttcctatctaaatgccctttatttctctctctctctcttttttttttttttttttgagttggagtctccctctgctgcccaggctggagtgccatggagcaatctcggctcactgcaacctctgcctcctgggttcaagtgattctcctgcctcagcctcctcagtagctaggactacaggtgtgggccaccaagcttggctaattttttaaatatttttagtagggacggggtttcactgtattggccaggctggtcttgaactcctgatctcaggtgatccacctgcctcggcctcccgaagtgctgagattacaggcgtgagccaccgtgcctagcccgtttatttatttctcttgcctgattgccctggccagaacttccaatactacattgaataggagtggtgagagaggacatccttktcttgtgctggttttcaaggggaatgctttcagcttttgctcattcagtatgatattggctgtgggtttgtcatctatggctcttattattgtgagatatgttcctttagtacctagtttattgagagttttwaaaaatcagccagatttactgtagaaaaaaaccccagatatacaatcctgtttgtttcctaggaaagtcccagtttctacccttgaacatttcaattagaactttgtttgatagactgagtttgagatttgaagagtgggaaagacatgaattgaggaaaggaaaggggatagagttccaattggggaaacagaaggagaaggagtgggcacaggtgaactgcatgcaggmatcagaaagcaatttcaatctgcagaattgaaaagtcagcagagggaagtaatgagatgaggaatgaagaggggcctggaatggggcaggcaggcagcaggaccaggggcctggcagagcagttaatgtgccctgcagggcacctactgcagggttccaagagycttgctgcttctttctgcaggacgtccagcatgtagacatcgattacatgaaccggaagctggatttcaccctcagtgccaactttcaaaacctcagtcttctgattgagcaaatgaagaaaaatggcatgagatttattctcattttggtatgtattgagacagatcagatcctactttctgtttccatattcatggttcaaaaatagcaccattgtgggaaactggatgaagggtaccagaaatgttcctgtactctgtactttttgttttgttttgcaacttcttgtggtgaatctataattattattttttaatttaaaagcaaatgaaagaaagaaatgaaaaggggcttttaaaagatgatactttataatatttattttccataactgtcactggaatataattattattctcttggtaaagttagaacaactgtgggctgaagcactgaagatagcaaaaaaaaaaaaagkggggggcatctcactgtttcaggctatgtctcaggagaaatagctgtatcttaatctcatctttacgtcaggaggttcaaaaatctcttatgttgtatcatcactcagaaatggtaaggctcagatgacatttcttcctaaacttacaaacaattgagttaagatccagaataccaatttattatattactaggaagccacatcttgacaaatgcagaggcaattacctgcaaatgattctctcttctagcttccaaaacttacagcattatttggtgacttttgctcacttactaattcacgtatttattgaacacagtatttgaaaaccactcttctacaagttgtgtgtgtgtgtgtgagggtgcatgcatagtctaaattagcaaggcagtgctctttttcttataaagtttttattctaatggagggagacagccaataaacatctgaaaagataatttcagacagtagtgatttatatgacaattgtgaaacagcataatattatagagaataattggggcaggtatgggatggagtgaacaggggaagatattttaaatagacagattgggacacagagagcaataaagaagtttcttgtttttgaggaacattgctattatactctggaaacatgataaattggctctctctgcttgaggattaagtcttatcaatctggtttatctccaggagttgtttccaaacactagcaaaagtttttctcaagaattttatggagaaacaccratgcattctttttcttctcaactgtctttgtaaaaatagatttctatgtcattggaaaaaatcacttatgtcatatttaaattcctacaggattttttaacatcttatttatttgtttatttaaatatttcaggkttaaactttttttaacttctattttagattcagtgtgtacatatgtaggtttgttacaaaagtgtattgtgtaatgctgaggtttggagtatgtattagtctgttttcacgctgccaataaagacatacttgagattgggcaatttacaaaagaaagatgtttaatggactcacagttccatatggctggagaggcctcacaatcatggcagaaggtgaaaggcatgtctctcatggtggcagacaagagaagagagtttgttcagggaaactcccctttttaaaaccatcagatctcatgagacttatttgctatcatgagaagagcagggaaagacctgcccccgtgattcaattacctcctaccatgtccctcttacaacacatgagaattcaggatgagatttgggtagggacagacccaaaccatatcagagtatgacagagtatgatggaatccattacccagatagtgaacatagcaccaaacaggtagtttttcaacccttgccccactccctccctctcctctcttgtagtctctagtttctgttattcccacctttatatctatgtgtacccagtacttagctcccacttataagtgagaacatgtggtatttgcatgtctgttcctkcattaattcacttagaataatggcctccagctacatccatgttgctgcaaagagcataatttcattctttttatggctgtgtattattccatgatatatatgtaccatattttctttatccaatccaccatagatgggctcctgggttgacttcacatctctgctattgcrgatagtgctgtgatagacatagaagtacctgtgttttttgagagaataatttattttccttagggtatatacccagtaatggggttgctgggtggtatggtagatcaattcttagttatttgagaaatctccaaattgctttccactgtgcctgaactaatttacattcccaccaacagtgtgtaagtgttctcttttctccacagccccaccaacatctattttttgactttccaacaaaagccattctgactcatgtgagatggtatctctttgtggtttgatttgcatttctctattagttatgctcagcattttttcaaatgtttgttagccacttgtatgtcttcttttgagcagtgtctgttcatgtcctctgcctactttttaatgggatggtttgtttttggcttgttgatttaagttccttatatattctggattttaggcctttgtcagattcacaacttgctaatatttcctcccatttggtaggttgtctcattactctgttgacagtttctcttgctgtgcagaagctgtttattttaattggatccattgtcaatttttggtttcattgcaattgcttttgaggactttgccatgaattatttgctaaggccaatgtcaagaacatttcctagattttcttctaggattttaataatttgaagtctgacatttaagtctttaatctatcttgagttaatttttgtatatagtgaaaggtaggagtccagtaccattctcttgcatatggtgagccagttatcccagcaccatttattaataaagaattctttccttcttgctcatttttgtcagtttttctgaagatcagataataattgtaggtgtgtgatagtatacgttgaggttgggtaatgtgatatctgtagttttgttcttcttgcttagaattgctttggctattcaggctgttttttggttccatgtgaattttagaatagtttttctaattatgtgaaaaatgacatttgtagtttaatagatatagcattgaatctatgaattgctttggttagcgtggccattgtaatgatgttaattcttccagtccatgagcatgaaatgttttttcatttgtttgtgtcatctctgatttccttcaacagtgttttgcacttcttgtaaagttctttcacctgcttggttagatgtwttcctaggtattctatcctttctgttgttgtcgtaaatgggattgcattcctgatgaactataaaaacattcttgtttttatagttcttctaggtgtgaagttggatcgttaatttgagatcttactaacttgagatttctaatttgagatttctcagcttgaacgttattgatgtatagaaatgctactaatttttgtacattaattttgtatcttgaaactttactgaagttgtttatcggttctaggagcctgttggcaaagtgtttagggttttctaggtatggaatcatgtcatccttggagagagagagtttgacttcttcttttcctgtgtggatgcatttaatttttttctcttgcctgattgctctggctaggactttcagtactatgttaaataggagtgatgagagggggcatccttgccatgctccagttctcaagaagaatgcttccagctttttcccattcagtatgatgttggctgtgggtttgtcagagatagctcttattattttgaggtacttccctttgatgcctaatttcttaagggttttatcatgaaggatgttggattttatcaaaagctctttctacatctattgaaattatcatatggcttttgtttttaattctgtttatatggcgaatcacatttattgatttgcctatgttgagccaaccttgcgtctcagggttatggaggaaagcctacttgaacatggtcagttaactttttgatgtgctcctgggtttggtttgttagtcttttgttgaggatttttgcatctatgttcatcagggatatcagcctgaagttttctttctttattgtctctgccagatattgrtatcaggatgatgttggctttgtatratcagttagggaggcatccctcctcaagtcttttggaataatttcagtaggattggaaccagctctttgtacatctagtaggattttattatgaatccatttggttaaggacttttttttggttggtgggctttttattgctgatacaattttagaatttattattgatctgtttatggtgttatttcctttctggttcagtcttgggaggttgtgtgtttctaggaatttattcrtttcctctagattttctagtttgtgtgcatagaratgttcataaaaatctctaaggatattctgtatatttgtgtgattgggtgtaatgtcatctttgtcatttatgattatacttatttgtatctttctttttttctcaatctagcagatggcctataatcttgtttatcctttcaawaaaacagcttttgcttttgttgatctgttgtatggatttttgaatctcaattttgtttagctctgctctgattatgatcatttattttcttctgcgatctttggggtaagtttgttcctgtttttatagttcttctagatgtgaagttggattgttaatttgagatctttctaacttctcgatgtaggcacttatggctataaactttcctagtgtgtcttagggatgatyatcttgcataatatttcatagggattctctgaatttcttaaattcacatgttgaactctctagcaagaatggggaaattttcatggacaatatcttcaaatatgctttccaaataattttttgtttccccttctctctcaggaatgccaatgagtcatagatttggcctctttacataattctatatttctcagaggttttgttcatttttaaaaattatttttaaaaaatttttttctgactgggttgtttagaagggacttgtctttgagttctgagattctttcctcagcttggtctattctgttgttaatacttgcaattgtgttataattttttgttttaatcccagaagttgagtttaggaagttcagtttagccattcagttaaaatggctgtgttatctttcacctcttggatcattttactggcttctttgaattgagtttcaacattctcctgaatcttgttgagtgtccttgtcatacaggttttgaattctgtatctgtcacttaggccacttcagtctggttagaaaccattgctggggagctagtaaaattgtttggcagtcagaagatactctgactttttgaattgctagggttcttgtgctgattctttctcatctgagagggcagatgttcctttatctttttgaagtcgctgtcttttggatatggctttttgtttttatagtctttattttccttgagggtttgactgtggtgtatrttgagtatagttgattggcttcatttctgggtgctttcagaggcccaaggctctttaagagatatttatctgtggctgaattcctgcattgggtttcacaggcaccctttttgtttggtggtgtaatttaggctgcgatacagtagrtggtgtttaagagtaagggccagaagatagcctcttaytcagctgcaggcctctttcatatttcagcacagttgcagtagtgctatggggtgggggagatgggggatccagagatggcccccttsccaagtccatttttggtgcttgagggagcctcctctaatcactgatatcatgcctatgtttccttagccccaagggcgtccctgacaggctgtgctcttccctcytagggacagcctgagccaaaggtcaagtcaccatgagacctgcagctccctgttggtcctctgtacttggcagagtcagagtgggttgtggggtatgtctgggggtgatctgttgaygcagtgggtcaagggcagaagatccccaggcactgcagtgttgccgtargggtgcagctgatatggtgccatgatccagtattttctgcacagcaaatggctttggggccctctcagcttgctctcccccaactgagtctccttccaatgtctgctctagtagctgccctgacaagctagttttgtcccaaaccttttgcacccagattgttggtctgttggatgttctgagctatggagctcccttgggcagagtctgtggctggtaaacaggctacatccttcccagaccagtctggcagagggaggcatgcccaactcccacaccagcacacaagcccatacctcactcttctcagtgttctgagagtggggctcctcccctactcaagcctcagccgcagatctcagctagataatcctgatttgtgtgcttaaaccctggtgggttggtactgggcctgcagctttgttttctggccttagggtccagcactggctctgctgggggtcagagtacttccaggccaccagcaaagcactcaggtggggcagtggaggctgtgctgtgtgcattctcttttgggagcagccaagcagtggccttggaaggggctggcagacgggtggcatgcagatcagatgcacccttgttctgtaggaaagacaacgctgctgtctcccagctcagctgtcagcaggggctagagccactcagagcaagatggagagcctttgcagatgggtcctcatggtcgtgttttgctgcagatgccctgtatgcagaaccttctcgtctccgcacaggcttgagctctgcctctgcctactctccaggcagtttctcttgccaattcaaatgtctatggtgtttgtggggtctgttgtagctaggatcccrgatgtctgcagtgcaagtttcccttcactcactccttccttgggacctgttcagtgccaggagctggtcccggcactcagcaactctatgtgggatttccagctttctccctcttacacctcagtgtttgcattgcctctctatagactggcagtgttatctttcaaaagctctgtttgaagygtaatggtttactcagtattttggtttttctccatgggagaggtgcttcccagccgcatctagctggccatattgtcccctttcctctcattttattacttacaggttkgggtggtaactttttgtagtatagaaaggctccttcatttgttggcacagattcttataccctttgaaagagattacccctcataagggttttatatcttactttgagtactcatggcaccatcccttttcaattggctatggtaatatatgcagtaagacataaggcaaattatcaatgatttttattttatttcattttatttttggtattgagattcaccatttccttctgcactatgaactactaaatttttggagagaaattttcttagagatgttttcctcacatttgctgtttgaaattcttttactgcaggacccagccatttctggcaatgagacacagtatctcccattcattagaggacaggaaaataacgtgttcatcaaatggcctgacaccaatgacattgtctggggaaaggtaaggcttggggaagatgcttacagttaattaacattacaatgtcttgaaataaaacagctctcaatacacattggaaaatatattggacaatcaataaattatgaatgagtagaaatctgtccgatgctgattagctcaataagcattaataagaccaaggttacaaatctcatcctctattattattgagcactgtctattgcctggaaatactctgatgtccccactctttatttattccacatggtcattaacaaacattaagaatccctttgagaatgacactgaaatctgtgtctcccagacacctgcatgcaaaacatgcgttcacctttgacctatcatgcttaatctgccttcatatctaaatgaatcattaagtcctatagattctcctctttctcttgtttcctttaattcgtctttatggcttcaatcttcatctttatatgtctgatttttggcaatagcattttaggtggacttcaggtgataatagcttttagcctaggttcgaattcttccttaattatactatgctacttcctactgctctggatgtattccaggctccttttttttttttttttttttttttttttttttttttttttgagatggagtgtcactctgttacccaggctggagtgcagtggtatgatcttggctgtctgcaacctcctyttcccaggttcaagcgattctcctgcctcagcctcctgagtagctgggattacatgtgtgtgccaacactcctgattaatttttgtatttttagtagagatggggtttcaccatgttggccaggctggtctcgaactcatgacttctggtgatccacctgcctcggcctcccaaagcgctgggattacaggcgtaagccactgtgcctggccctgtgctcactttgaatattaccttctcaacttacccagataatatcttcacttcaagatcaactcaaatcttacctcgtttgaagcagttagtaactattttagtttttcctattttcccttgtctgtaatattgccttcagtatagcatacagtgtagcatttatgtactatctgtgaactcttaggaaacaagtactatttcttacttaaatctcagtaaatacagatcctggaagagtgcttgtcatataggaagtacttagtaagtgtctgttgattgaatcaattaatcagtgtgtatatacttaatgtcctggtagttacagctaaaattagttggtactatggattttttaatgctacatatacttggagtccgctataagtcacgatagtgcttaaaagtattgaggtgaggtgtatgggttatgaatggaaatcaatcttatttctttagagtcacacttcatacttattatgaattttgttataggtctgtgacaaggagatcagagatctgagaaatcactcgaaagttggttgttcagaggatatgtttaaaagaaattcagttaattattaaattcaaaaatagaattttgaaaacatagaatgaatcaagagacccagcctactttcacctaatgtaattttgtagattcagcctttacagtttaatttatggcaaagattcccaagcgtttcatggagatgcctgtcatcagagtctaacacatgaaatatctcatagtctgtatgcaaggatctgtaaaggttttaattgcccttctttttctctaggtttggccagatctgcctaatgtaattgtagatggatcccttgaccatgaaactcaggttaaggtacagttgtatatagatttttgtcaacattgccctaaacatctggatatttacattttttatcctgatgaataagtagctaacccttcagttaagtagccctaacttgagggtgcttatccactgttagtttcttggcagaaagagatcctcgagtggaaagctcaacaaacagcgaacatggaaatgtgtagaaggaaatcatcaatgaaatcctctcataagtgtgattttaatgggctgtgatttgtttgaactttatgrcgcttgaaaaataatgaaccaaagtctagcattttctcactagaggggaatccattatgaacagactggattttaataaattatctgcmtacaaaagaaaatacaagtcagctgaatgaaggaaagttgttaatctcagcctggtcatctagcatcccctctactctggagttcacttgcccctggatgacagtcctccttcatctcatttgaatagtctggaaaaagcttttgctaatatcacactgatatttaagtaaaaaaaaaaaagaaaaagtatttgcatctctaaagttcaattgttcagacactgttaattttccagtcttgtgattacatgtccagttattaaacaaatcctgtatttgaaagggattataaagctatctaaccttcttctaagaaaataaagaatgaagtcagccttccccaatctctgcttctgttgtaaactctgcaacagcagcagatctgagattagagcagagactgatctgggcaggcacaaattcctgttcatctcccatttgtggtctcctgtataggctgagaccccgacaatgagagtgtgtgttattcttacagctttacagggcctacgttgcctttcctgacttctttcgtaatagcacagctgcgtggtggaagaaagagatagaagagctctatgcaaaccctcgagagccagagaagagcttgaagtttgatggattgtggattgtaagtgcacccttggttgtcttttttttttttttggaaatgttagcaagtcaaaacatggggaggagagactagcaaagcagagacatagggctgaagagatgaaagggagaatctaggtgctgttacagaatctaggtgctaggaccaagagaagcagagatcattgctgatctgcccagggacatattgtctggtggatgttggagcccacagaggagactgctactgctggagatgccagagcaaaagagaaagggagaaatcacctcccatctccaatctcttgccaatatcacccactggccaaatctacctgaaagcttattgtaagggagtcttacagggcagagctgggagtgggtgaggcatggagttgagagcaagtagacgtttgccatagtactggggcagacaactctgagggaatggcttaaagggcctgttcagatgtttgctgtaaatgccagttggccttaaaagcaggacttcctgagatgtccctgggatatatgtccaagggcagctctatctatgttttcctctgtcctgatttccttccccactgtccagtggcctgaaatcttaagcaagctctaggccagctctgaagagctattcagctctgggtcagactggaagaagtctgtgattcactccagagacaaaagtccactgaaaacacaggggcctccctgaccacccgcacctttgagatagttaggcacagaatagacatgtgaaaggacacaaattaactcaaacaggcaaatcagacagtggagagttgtgggcagctttgagaataagagatgctgatagctctggggtagtatttttttttttttccaatggagggaaagctgtagctgggtaattcaaagtaatgaatagttcctcaagtactttcatttgcctttagtatgtcctatttaaaatagtctggctttcgaaaatttaacttttccattgtcagagtgcacagtgaacattcccttaggagcccctactccttgcatttaagtaacaaattccccaaagtatgtttttatttccaaacttgtttctgagttacatataactttttagaaatatatttatagcagaaagtgagataactctccttgtgtttggcctatgccaatatcagaattagtccaagcaactggactaagaaaaaatagaggaagataatagtaacctctggccatagactaaaaagtgaataatccatgcgtagtaaaacaagatgggctacctctgttggggasttgtatcaaggggagttgtatcaagagatttccttaggtcctgtgtccagcattacctcactatttttgccactgtaaaacaatccttgtaagttttaaaatgccaggtaagcaaggagtttagcactccactttggccgatataaatttttagagtccatttgggtcaatgccagggattacactacacatttttagagtccatttgggtcagtgccaggaattaaacacagtgaactaaaccaccagctgagctgagggcttcaaaagtcatctccctgagttagtgtcctctatagccaaggccatcctgcccctgacatgacgagatctttttttgttaactcatttcaggatatgaatgagccatcaaattttgtggatggatctgtcaggggctgcagcaatgaaatgctaaataacccaccctatatgccatgtatgtaaaataattacttcatcaacttactttcctactcaaagactccaaaagttttccttttactgtcaaagtgaagcctaatgttgaagacagaaaccattctccaacatgacatgaaatcccaagtaagataaccttgaataagtgcagctaaactaatcaagcaagaaataatgacatgatgtggtgtgaaagaaaccaaacgatgcatggtacatttgattccattgataactatgaacagattgctaaaattttaaataaacccttaaacacacacacacacacacacacacacacacacacacacgtggagagatgttcttttgattaaagaattaaaacctagtttctgaagtctctctgcccatgtaaacagacatttgatgaaggatactttttggtcattctgtggtacaaacaaaaatagaatgttggtatcaaaaggatctcagaaagttgaatcttctcgtgttgcagagaaacaaggaaggaaatgactcacttctaaaagtactgtaccacggctgaggtgggaggattgtttaagaccaggagtttgagtcttgagaccagcctgggcaacatagtgagacccataaaaaaaaacaaacaaacaccaaaaaccagaaaaacaacaacaacaaaaggcattataccagtaatctatgggacagaatctagaattcaagtttcttgatgtctacatcactgttatgctgcccatttctcactcactcactcattcattcattttctccttcattaatttaatgcagggggtgtttgacttgcaatggtctgacttatgattttcaaccttacaatggtaagaaagtgacatgcattcagtagaaaccgaactttgagagcccaaataaccattctatttttcactttcactatagtgttcaataagttacaagagatattcaacactttgttttaaaataggccttgtattagataattttgcccaacttaggctaatgtaagtgtctgagcacatttaaggtaggttaggtccattcaatgcattttcaagttacagtattttcaacttgtgatgggttcatggggatataatcacattgtaagttaaggatcatctgtacttatgtatcaagcaaatgctgtcaaatcagaaagatttagagacacaaatacaaaaatgattgaaatagatttattccctggagaacattaccatctagtggaagaaacagtcctaacaatgaaggagtttattatgttggcaaaagggctatgacaacactctataaattaaatcagagttggtgcaaaaagaaggggagctgcttttcccagctccatattttatccttacccttcattagttataaagacacagaacattgttttctatagactaaaacctcataaaattgggtctgttactggtaacaaagttgttgattgaagtaaagaaatgccaaaatgatgggcatttctagtgaatgtgcaaatcatgttgtttaggaaataactcaacatttcccctcagatttggaatctagggacaagggcctgagcagcaagactctgtgcatggagagtcagcagatcctgccggacagctcccccrtggagcactacaacgtgcacaacctgtacgggtggtcccagaccagacccacatacgagtgagtgtctttttgtcacagcagcaaagataattttccacatcattccttttgccatttcatatttgcattgtgcatgtatctacgtgatccgagttaaatgggttaaagtcaaaatttcaggcacggttgcccaagcaaccacctctgagcgcatttatcaagtgggttactaaattcacctatttaaagtgagcaattaggtaatgtttagtatattcatagagttgtgcaactatcacaaaaattaaattttcgaacattttcagaactcgaaaaggaaaacctttgcccattagcaatcatttctaccttgttcctacctcctgagccctagccattactcatctattttctgtctatgtggattgcctattctggacatttcataaaatggaatcacacaatatgtgctcttttgtatatgggtactttcacttggcataatgttttcaatgattatctatgttgtagcatgtatcagtacttgatttcttttgactaataaaatttcattatatagatacaccatattttgcttgcctatctaccaatgagtgaacatctaaattgtttccattttttttttggctattatgagtagtgattatgtgaatatttatgtgcaagatttggagtagacatgttttctttgttttgaatatgtatctaagagtggaacttctgtgtcatataggaactgtatttttaatattttgaagaaatatcaagctgttttctaaaaaggctgtaccattttacytttttttttttttttttttttttgatggagtctggctctgtcgcccaggctggagtgcagtggtgcaatctcggctcactgcaacctcctcctcctgggttcaggtgattctccagcctcagactcccgagtagctgggattacaggcataagtcaccatgcctggctaatttttttgtattttttagtagagacgggtttcgccatgttggccaggctggtctcgagctcctgaccccaggtgatccacctgcctcggcctcccaaagtgctgggattataggcatgagccatcgcacccagcctaccattttacattcttacctgcatgtatgataaaatgtataagagttgcagttcctccacatccttgccaacactcggtggtattcatctttttaaattatagacattctaatgggggtaaagtgatatctaattgttgttttcactttatttcactaatactaatgttattgagcatgttttcatatgctattggctatttgtatatattcaaatatctattcaaatcctttgctcatttttgatagaatcattttttttaattattattgagttgtggccaggcgtggtggctcacacctgtaatctcagtactttgggaggccgaagtgggaggattgcttgagtccaggagtccgagggcagcttgggcaacataatgagaccctgtctctacaaaaaacaaacaaactagccaggcagaatggtgcatgcctgtagtcccagctactcgagaggctaaggtaggaggatctcttgagcctaggagtttgaggctgcagtgaactatgatggcactgcacttcagcctgggcaacaaagtaagactatctctacagaaaaaaaaaattattggatcgtaagaattctttaaatattctaaattcaagcttctcatgagatatatagtttgaggatattttctctcattttgtaaacttttcacttccataaccatgccttttggagcacatttttaaaagtttttataaagtcctatttattcatttacttacttattcatttgtcacttgtgcttttggtgtcatattcaaggaactattacctaattcaaggtcatgaagatttattcctatgtcttcttctaagagctttatagttttaggtattacaccaagatctgtcatccattttaagtttatttttgtgtatggtgtgaggtagtggttcaatgttattctttccttcattttattatcttgacaccttgtcaaaaatcaattgacagtaaatgagaaggcttatttttgccttctcaaytctatttcattgatctctctctctctctatatatatatatccttatgccagtaccacactgtcttaattgatgaagtgtgactcttccaatttttttttcaagattgttttagctactatgggtcccttgcatttgatatgaattttgtaatcactttgtcagttttgacaaaatagcaacagggattttgatagtttttacattgagtctataaatcagtttggtgagtattaccatgttaacaatattaagtctcttttgattcattagcatgaggtgtctttccacttatttagatctttaattttttcaacaattatttttagtttttaatgtatatgtttttggccattatttctataaatatttatctgtccctttgtcttttcttttatccttctgagattttgccactttccaatgtcgttgggaaatttcagacttgttctttagttcttcccaggacagagtgtgatcttttctgttcaactgcccctttctgctcaagtatctgagctctctgccttctgtccccagagtttacaagaacctcatactatttgattttgggctatcaacaggtgatgtatcatgttgcccctggtgttccacaatcaggggcaacatggtcttccaaacagaaattcttcttccctttcccactttctttacatcttcatctttcagttgctctttcacagtcttgctttccacacctagcttgaggcttttccaaccaaggaaaaactagttcttcaggaaaacacccatgtcattatatgaaatacacacaaaacaaataggtgttttgcaacctcagagataaccttaccttggaagagtacaaggatgaataagtcacagtccctgctttcaaggacctcattgtctaattataggagtcaaacatgagagggaaaatcaattaactctactgggataatccagaaagtcttcatagaagaagtgatgtttgaatgttggttaaaagaagagtagaaattttcttttggcaaagaaggggctttcagggcaaagaaagcagcaataagaagatgtgaaaacttgataaagtttctaccaaaagctcaactttcccatgcaccatcccctcctctctcttcagggaaatttgcttttcacacatctgcatcccatcgccatctttctcttcagagaagcttgctccacaaattatacttttccatgggtgctcgtttcttcatgaattattttttatcttcttcctcactgctggtatattgctttaggatttaggctgtgaaatcttctaactaaactttctcatctttcaaattggaaaaatcrtggcatctattgttaatataaaaattaaatgatataatgaatccacaagtacttggcatattgtaagcactcaacaaacattatcaatattttttaattccttttcatcaatatttgaaaatgccccagttgttcttgcttttgcctatatcctcctccaaccatcatctaatctttcaactccctctcatattcaagctgtttgaaggaactctttccatacatgatatatatattttttaattcccatacaccttgatgtttctccctttaccaatcacaaatgctggtcattctgaccttgatcaggctaatctcttagcacatacaatctaaagaccaacttacatctatttccttcatgaaacctgctcagattactccatccctcctaattccctccttctcttaactactaacctgacagtatgttctacattttaagttatttcctctacacacctggggagaagaccatgtcttctttgctcttttctgtccaagcactgaaccatttttatttctttttatgaaaatgcctttgtttgtcagccctgagtgcctgcattgatgggagagctcagcgtttgtggcatcagtggtcagttttgttcactgactcttccctgctgaccttcatgctacatcctctgctgaccttgaggttcacaatattgaggttcataatatgccctgctgcatatgctctgtgtgcttttgctagtttctcaggatcttgactgtgctttccaacctagattccagatatttatgcatttacctctctggccacagttccacaaactcctttgcaggtttcccttcccagtctttccaagcctatgctccttccacacctgggttcagtcatctttttttttcttcacaccatgtagcttttcccttggataagcacaaacacatactactggctttaaatacactctggattcagatggcccccaaatctttgttcccaacccaaacctctcttgagcctcaaacctagaattgcccatagctgtctcatttatgatgtcccataggcacttcaaatctaatacttaaaatgttgaactatttatctctcccttaaacctgtcctcctgcagtcttttctttcttcttcttttttttttttttaagatggagtctcgctctgtcacccaggctggagtgcagtggcacgatttggactcactgcaacctccatctcctgggttcaagcaattctcctgcctcagcctccctagtagctgcgattagagttgcatgccaccatgcccagctaattttgcatttttattaaagacagggttttgccatgttggccaggctagtctcgaactgctgacttcaggtgatccatctgcctgggcctcccaaagagttgggaatacaggcgtgagccactgcgcccggcccctccagcattctttattttagtgaaaggaaccaagtttaactagtcattaggtcatcctagattctctttcttttcctgctttcagttggtgactcagttctttgcatcagtcactactctatcttcctgccttattccaggccttcattatctctcatctagactgttataaaaatctaagctatcctcacccccatttstttatcacacatacatacatatgcattcttccaatttgtgtatggttaaatctataccttttacttcattatgttttgtccattgtttttatttgaaattcctttctcttgtagaaatcaggtggtttatatattctttcagttttaatagaacatgtgtgtatgtgtgtgtgtgtgtgtgtgtgtgtgtgtgtatttccattcatttttggatttgttttggtgtgaaaaattggaaataacccaaatggattagtttacacaacagtagtcagctacttttcctgacatcatttattgactaattcatctgtgtctattgatctgtgatgcttttttaagcaaatacttggattgtatacatactaggatctattagtagactttctcttttgttcagttgatttttccctcacacagttgttgttattttctaagggtgcgtgcagatgatccatcttccactgaaagataaacatcttttatgtatatttgcctctgtgtgcaaaacatgtctcgctttttgaggtacagaaaagcagagtgaatatttccaaaatgctgtagcttttatttggatcccagatctgcctccttattctttttttccctcttcccctgtctgccatgtgactacagacatgcgtgcaccaccctgcccagctaattttatttttttgtagagacagggtctcaatgtgttgcctaggctggtcttgaacttctggcctcaagcagtccttctgccttggcctcccaaggtgctgggattacatgtgtgagtttctgtgcctggcctcctttttactcttttttttttttttttttttttttttttgagacagagtcttgctctatcacctaggctgaagggcagtggcatgatctcagctcactgcaacctccatctcctcaggttcaagtgattctcctacctcagcctcctgggtagctgggattagaggtatgcacaccacacccggctaattttttttttttttagtagagacagggtttcaccatgttggccaggctggtcttgaattcctgacctcaagtgatccacccaccttgacctcccaaaatgctgggattacaggtgtgagccaccacacccagacctctttaccctttaaatgacctttggtaagcattttaaagatcatcttattttgtccagctcactagtttcaggcgaatgcctttctaacttctctgaaycttagcttcctaacagtaaaaggagtgcaaggaaaccttttcatgatgttatgagacaccacataggaaagtgaccggtataatactggaatagaggaattgttccataaatagctatattacgcctcactcccacccctttctcttactccagggtgatagttaattaaccagatttttcaaaaatgaaacccacattctacgtgcagatacacctctagtcttgctgtgaagtttgttgggatctttagcatggctttgagacagcagattctttcagggaagaagttatctgactcggaccgaagtaccctcaccctctcatgctccaagctgcagttattctctgtaaaggagtttgtttcttcaactcacctctttattcccctcccaccagagctgtgcaggaggtgacaggacagcgaggggtcatcatcacccgctccacatttccctcttctggacgctggggaggacaccggttgggaaacaacacagctgcrtgggaccagctggggaaatctatcattggtgtgtgggctcattcccaggggcctgtgctggcagggagggcactggagtttgtgctgttcaacagcactggttatgtctctatcatcatctaggtgggtggtaaaattaacaagaactgagttctctctgggcgtggattttaatttacacccatcttttaatattttcatcatggtccagggctttctaatggggtaaggaaaaatcaggccaagccttcactctcctcccaaagtgctccttcctccaacacagctgtgtcttctctttgcaggcatgatggagttcagtctctttggaataccttatgtaagtcacattcagaccattactaattgcccagtcagattttagtgagtcagcgcctcatgaaattcccacctcatgctctcattatgcatcttctcagacaggagcagatatctgtgggttctttggagatgctgaatatgagatgtgtgttcgctggatgcaactgggggcattttatccattttccagaaaccacaacaacatcgggacaagggtgaggcagtagttcgtgctccaggtgttgtgtaccctcaaatcataacttctttttaacccccaggactattatactcatttcctgagaaaaatcaaaaaacatcaccagaatcttaatttcttggaaaatccacagagttcagaactctggaattatcagtaatttttagaaatataccttttctcatctcctggagaattactacccatgaggaaaggtttttatagttccacatggggctaaaatgaaagaagatccctttgcttttaagaatattgaatttgtattttactcaaattcatcgaagatatgttggtgctgcacggaaacctctctctgtacacatgtagagggccagagctggacctattccagggacttaggaatcagtgataaagaggagaaagcaagaaattctaattttgtagggtggcagagatgggggaaagggtaggccaggaatgaaagggtaagtggcttgtaacctacattttgaataaatgcccattgattcttttctgatgccactgggatggaatgaagaagaggtgatccattatatgcttctttatccttacagagacaagatcctgtggcctggaattcaacctttgagatgttgtccagaaaagtcctagagaccagatataccctgcttccttatctctatactctgatgcataaagctcacgttgagggcagcacagttgtccggccccttctccatgagtgagtacagcctctttccccaagcatgtcttgcaaataatcctctgtagcagtcataagaggataggtgaatttttcctgtttatttttttaaggtttacggatgacaggacaacatgggatatagaccgtcagttcatgttgggccctgctatcttaatcagccctgtgttggaaactgtgagttcttcattgtaggtcagaaaaccttcaatcacatgatctaaaatcatgggaaaagcatttcaaagatcatcttattttgtccagctcactattttcaggcgaatgcctttctagaacatctacaggagatctttttcttttatttaaaagatctctctgttaatgaaagctttactacactgactgatttctcattttaaaattttgtcatttactttttaaaaatacgttttttctgtagttctgaggaataatttttcaggatttttcttaataaaatccctcaaattattgcaatcactaatacaattttcattttttatcttaattctacagtgttttgaaaatgaaaatgaaaaatattttttgaaatattcataatgacatgtcaattttatgtttcagagcacatttgagatctctgcttattttccgagagcccgttggtatgactatagcacggtaagaactaatatatttgtgaagaacmagtttggtctatgcagggtggagaggtggatagagccttctatttccaagcacatatttcctaaggcaataattttgacctttttagccttggcaaggcttgtttaaatgaaagcatgtataagagcatagacgaaatctaagcacctacatctcattgaagctcccccctcacccttgcccttgcctctcaacttttctggagaaacaaagacaagtctagattttcagtcttaagcaaaactgaaagatcagagattttctctttaggtttgcagtcttttgctgactttctaacatgcttcccaggaaaggaaggacttgtaattaaaacatgctctcatttaatatatttatctctcgccattttttgcctgtattctcctttctagggaactagcagcacatcaacaggtcagaggaaaatcctgaaggctccccttgaccacatcaaccttcatgtcagaggaggctacatcctgccctggcaagagcctgcwatgaacactcactccaggtgaggagaagaggcaatgtctaacagcctcttgctataccgtaatgaggaagccttacaggaggctgtcccaccttcgccagggatatgtggattataaactaaattgccaaacagctttactggtcagatcctgtgagygctttctgagtgggacycggaggaagatgagttcataaagttagtcttagggatatatatacacacatatatttttgtctgtagtgctgtatcaaaggcaaaaattttcctgaaggcagaaaaatgtttctctttccacactgttaaaaaggaatagggaatgttaatgagctctttgacttgtgattgaacaagaactaggtaggactgagtccttgtcctatcctagaacttaatgttcattcctaggtctgctttggtcaatcaaggaaagatatgcttgtgtgttgtgtgtgtgtacatacacgtatataaattacacatataatatgtaaaaatttataaaatcattgattaaacagaacacgtcacatcaagaaaggcacataataacaagtcaaaaggagagaagttaactttcagccttgtggtataacacatggtttatatgaaagagggctttgagctggatcttttagatttgaatgtacaaaggggaaagagagatcctggtcgattaaagaactgaaggtgaaaaatggcttgggtttgggaacataaaccatccagtttaactggaggacagataaaggaagagataaaataagtaaaactccagcaggttaggatcagatcctggagggtggtgaatgccaagccactactttggattttattctgtggcaacctggaagctactgaggattctcttttgagggattttcttcctatgaaattaatatttcattatattacttgtatgtatatttgatttttagaaattgaagctaaaccaaatgttttattaaattttaaacgttttccattaacttttaagtgtcttatattttatctattgtacctatttttagaactttatatgcatatttaatacatttcttttatttctagataagtaatgtttttaacacagtctgttctttattcttacaacctacaatctagagaaaaataactctttttttttttttttggtagtcgacaaaattttatgggattgattgttgctttggatgacaatgggacagctgaaggccaggtgttctgggatgatggacaaagcattggtgagtataaactttccagggtccctgtacatcactgagaaaaatcataccatagaggctcggcatataactaacatgaactgaaaacctctctctgcctattgtcaataaggcaataacatttggagaatttttccaacttttgcctgctcatttatattatactatagttagtatagactgggtacagtccccagctttgtaggttcagaaacttgctgttatgcattcagccagggatgatctatctctgtataactgtctcactcttgatttaaaaagaagtgtggatgcaaatatcaggctgatrgttaattcattctcaatggracagaaacatgactctatcatttggatcagccatctataccaggcaccctgttcctcacaaataggcctgctcaagaggcaatttagaggttagaaaatttcttggtgactcataaattgggaattaagtgttgcccaaaggatacttacatcgatgaaatattaatttgtatgtttcctttccccagttgagatagagtatgttagttctacttaggtaagtgagatttgtcattatcatcagaacaccctctaactcagamttttctatagatatatggacacactgttactagctgactctcacttttcactacttattactgtggaccagaaccttctaatcttgcaacataccacattttctgaaattatagtatagcttatttttcactactaatatttctagagattccttcttttttaggttccttcattataaagataagaaattctcattaaagaagtagatattctttacaacacatgttaaagacagaaaattagaaaaaaatacaagcacttttaatatttttgctgtactaactttggcttttgtattaagaaaatgcttaatttttaatatggctgaaaacattttgcatatttaatttgtgaatcctgtttattttcctctaacataatgacagaaacatgtgtgaatgttattatttgttccttataaataccattatgatgatcatattctattgagagaatatgtacaggttggttttaattttcattgttataaataacatcctttttcctttttttttttttttttttttttttttttgagtctcactctctcattcaggctgcagtggcatgatctcagctcactgcaacctcctcctccctaattcaagtgattctcctggctcagccttcccgagtagctgggatttcaggtgtgtggcacaacacccactaatttttgtatttttagtagagatggggtttcgccatgttggccaggctggtctcgaactcttggcctcaagtgattcacccgcctcagcctcccaaagtgctgagattacaggtatgagccaccgttcccagcccatatataacatccttgagtattaaccattgtttccattttagattacgtccatagagtagattcctggaagtgatattactgtcttttaatcaactttaaaaaagttgtgatttatacaaataaaatgtatccattttaagaatacagttaagttttgacaaatgtgtacagttgtatagccactaccacaatgaagatgtggaatatttttataaccctgaaagttcgccttttatagtcagcctgcggattcatccaactgtggtttgaaaatgcagttagcctacaatagttgcatctgtattgaccatgtacagacatgtttttcttgttactattttgtaaacaatacaggataccaatgatttacataatgtttacattggatcaggttttataagtaccctggagattatttaaagtacacgggaggatgtgtataggttatatgcaaatattataccacaaaataacttacattcaaataataatgtcagattcattttaatggtcaaaaaatgaaaccactgaaatattcatcaataagtatattggtcaatagtcatggaatattaccatggaagacaccatggattattattaggaataaaaagcaattaaagcaattaatttcttttacatgcaacagcatggatgaatgtaaaaggcatttttgctaagtgaaagatgctaaaaatacaaaaatagtacatattgtatgattctattcatataaaatctagaaaatacaaatccagtctatagtcacagaaagcagaacagtagttgccagatcctggaaggaaggatcaggactggggagaagctgactagaaagaagtactgctgtccctgggtatccataggcggttggttccaggacccctgcggatatcaaattccacagatgctcaagttccttatataaaatgataatatttttataatttcaacttttattttagatatagggtrtacatgtgcaggtttgttgcatggatgtattgtatgatgctgaggtttggggtatggatcccgtcacccaggcagtgagcatagtaactaatgggtagtttttcaacccatgcccccattccttgttaccccatctaatagcctgcagtgtctattgttctcgtctttatgtccatgtgtactcagtgttcagctcccacttataagtaagaaaatgcattatttggttttctttttctgtgttaattttcttaagattgtgacctctaactgcatccatgctgctgcataggacatgatttcattcttttttatggctgtgtagtattccatggtgtatatgtaccactttttctttatccaatcctttgctgataggcacctgggttgattccatgtctttgtaattgtaaatagtgctgtgaggaacataagagcacatgggtccttttggtagaatgatttattttcctttgggacataccaagtaatgagattgctgggttgaattgtagtcctgttttaatttctttaataaatctccagactactttccatagtggctgaactaatttacatttccaccaacagtgtttaagcatttccttttctctgcagccttgctagcatatgttattatttgactttttaataatagtgggtttgatttgcatttctgtaatgattggtgatgataagcattttttcatgtttattggccatttacatgtcttctttagagaagtgtctgttcatgtcctttggctattttttaatggggttatttgacttttgcttcttgatttaagtttcttatagaatctggatgttagacctttgttggatgcatagcttgtgaatactttctcctactctgtaggttgtctactctgttgatagcttttttcactgtgaagaagctctgtagtttaattaagtccaacttgtcaatttttgtttttgttgtaattgcttttgggggcttagccaaaaatattttgccaagaccaacgttgagaaatcagacaagacacataaatggaaaaaaacattccatgctcatggatttgaggaatcaaagcaatgtacagattcgacactattcttatcaaactagcaacgtcatttttcacagaattagaaaaaaactattctaaaattcctatggaaccagaaaaagagcccaaatagccaaagcaatcctaagcaaaaagaagaaaaccagaggtatcacactacccaacatcaagctgtactataaggctatagtaaccaaaatagcatagtactggtataaaaacagacacatagcaatagaacagtatagaaaatccagaaataaagccacacacctacaaccatctaatctttgacaaaggtgacaaaaacaagcagtagggaaagactctattcaataaatggtactgggacaactggctagccatgtgcagaagaatgaaactgaacccttacctttcactgtataaaaaaattaactcgagatggattgaagatttaaatgtaagacctcaaactataaaaatcctagaaggaaatgctcttcatgttcttctttttctttggttattttagctcttttgtatttcacacagattttaaaatcagcttgtcactttttaacaacaagaccaccttctggaattttgactgtaattgcttttattcttaagaccaatttttgaatatttgtcatctcttttttttctctgtctctttctctcatctacttacctacttatctacctatctagctctatataattaccatttacttagatctttaattactcttagcaatgttttataatttttggcgtatagttcttgtacatattttgttaaatatgtcctaagtatttttaagtttttgatggtattttaaatatattttaaatttctcctaacagtttatggataatatattataacctatattcacttaatatgatatatgagagatatttttcaaatggttttattttctatttatgggtgaaaacttgctaaagaaaaaatatgaaggaattaaacaacttctctcttcagagctcagttcagtctttggacttgctttttaacataatctgataagaagctctaggagaggcatgtggtattctgaaattaaatagatctaggtttgaataccatctcagtaactttctagttgtatatcttctggaaaattacttattttgttgtctccatttattcttctttagtatctacaacatacacctatgttgtaattttatgaggataaaatgatttaacatacataaaacattcctggcacatgagttctgaacaaaatgtgttattaatatgtaaagtaaataaaactctattctaaacatttaatatgagctactttacataaaattagcatgtctaacttatgaaaacaaaatgaaaataaataaatacgtaaataaaataaagttagtgtggttaataagataataagacaataaggcatccaaaagtcaaaaagaggaggttgaccagccatcctgaatttcaaagctgtagcaggacttgagccttataagggcatactacggtgccaatttttaaatttaagaactgtatttattaaatgcattttaatattcctgtctcttgggaaagtacatattttttctcaaattaagcctttgtgaaagatgaacgtttaatcaggggtttgctaggtgagcaaggaatgataataaaaggagttagtgcccatgattagacagtcaacactttggtacctcagtgagtcttgccaatgggactgcagactgtttttgttgtcagatcatgacaagtgcttggtatatatccattcatcaattgatggacatttgggttgtttccactttttggctattataaataatgctgctatgaacatctgaatataagtccttgaatagacacacttttaaaaactctcttgtatattatacatacctgggagtgaaatttctggcttatgtggtaactctatgtttaactgttgataaaatatccaactgttttctatagaggcagcaccattttacatctcaatcagcagtgtatgagggttctgatctctcttcttccttgtcaacatttattatctatttttttattatgatcattccagtgggtgaaaagctgtagttttttgtggttttgattaatttatatttctctgataactaatgttgttgaacatctttacatgtacttattattcatgtgtacattttcttcagagaaatgattgcttatattcttttcacattgtaaaattaaagtgtccttattattgaatcataaacagtctttatagaatttagctaaaagtcccttatccgatgcaggattttcaaatattctctctcatttagcaggtgcctcttttgaggcacaaacttttaaattttgatgaagtctaatttatctatttttttctattcgtttaatgtgcttttggtgttatagctaagaaaccattgcacattacaaagtcccaagtatttgctactagattttcttctaagagttttatagttttagctcttacatttaggtctttgattctttttgagttaatttttgtgtatggtgtgaggcaggggtctaacttctttcttttgtatgtggattacagttgtcccagaatcatctgtgaaaagtctattatttttctcattgaattattttggaatttttgttaaaaatcaatagaccattactgtgaggatttatttctgaattttcatttctattgccttaatctatatgtctattcttatgtcagcactgcactgtcttgattacagtggatttgtagtaagttttaaaatcaggaagcatgagttcttcaatttagttctttttcaaaaatgggccttattttaaagcggtttttctcaacctcagcaatactgacgttttgggctaaataattattttgtggtggtggctgggctggttattatacatgtttagcagcatccctgccctctccccacttgatgtcaaaagcaaagttatcttcaagataactacatgatctctaaatattgtaaaatgtctccagagaggcaaaattactgctggttgaggatcaatgttttaagagaacatagaaagtcctttgatacaggtttagctaattaggactagatgagtgatgtcatagtaggttaataacatcacaattagtatgcaaaatcaaccccctatgagcaatatgtttcaaaaatttaaaggaataaagccatttcctacaagattttaactttctattacagtatattttagtcttaagattaaaaattaatagtacctgaaactttcaaacttgtaaatttttatggagaaggtttttagcctttttaaacatcaaatatgcttaaaaattcaaattcagactactaagatacagtgtaagtgtcatttaaatgttctattagcagacttggaaccatttatttaacttttcctcacataggtgatataatggctgttcaaggwtaatcttaaaagaacatgttaacagaatcccattctttacaatttttttattaactgctagaagaggctgtagtgtttgcccaggttgcattttctagccaagactaaattttaaaatatgagttgtataattgcttccataaaagtggaggtaatttagaatacttcgagagttagttggtttgggagagaatatgttggaatactgacaagagttggaatgttgagaagggccaagaacagaacatgaagtgaaactgatttttcagaaacagggagttataggaaccatatgggaaggagacataaagtaaggagtatttcaaaggagaggtgtgtgggcaaagtggcctaaaaatcctgaacagtgtgaggagatatttagattttatatactatgtcactggtgacttagaaagggtcagattccatggaaaaaggaaacacaggagctggagtttaggagatgtaagattgaattatgagttgggtacacagacataacaagtaaaggctacatttatttatttatttatttatttatttttatttatttttttgagacggagtctcactctgtcgcccaggctggagtgcagtggcgcgatcttggctcgctgcaagctccgcctcctgggttcacgccattctcccacctcagcctcccgagtagctgggactacaggcgcccaccaccacgcccggctaattttgttttagtatttttagtagggacagggtttcaccatgttagccaggacggtctcgagctcctgacctcgtgatgcgcccgcctcggcctcccaaaatgctgggattacagtcgtgagccaccgcgcccagcccagcaaaggctacctttttaagatgtatggtaataaaaaggagatgcggtagtagctcgatataaatagaattaggtaaaagtattatcagaacagagtactctggagcataaatgtagcttgaaaaagcagagaaggtatagggaagaatcgatggaataaattctacagaggcagaagtgcttggaatctggagcactgtgggaggatgagctaagagtagggagagaagaatggtgaaggtgaagattgatgacgactttgacgacagtgagcaatcaattttaagcacttattgtgcacaagccgaacattatgtaccttattgccactaactaggtactattatctccattctatagatgataaaatgttaagtaacttgtctgagtttgcacagctattaagtacaagagttgggatttcaacccatgtctacctgacttgggagcctaaattcctaaccactcgcctctgctttatcatcatagtctttaacaccactgctatgtgaactcctatgactacatgcttgctgtctcgcacagaataaccaaacagtagtctccacacttcaggtaatctatcctttgttcaacccagattctcttgcatttgtaaccttctgacctccccggcaaggtacccatttgcatttgcacatccccacactaacatgcagtgaaatagtctcttagccactctcttcagtgctcctcagagaggtgacaatcatcagtaactgtgaccccattgagagtgtggtttctgaccacgctcaagattatttgctgcaattgaagcagttagtagttgcttattcttttcttttccttgtttgcagatacctatgaaaatggaaattattttttggcaaactttatagcagctcaggtaagactaatttactacattttacaaatcttttcccaggtgtctacagattaaacattacagttaactgcgtaaatgtaatatcccacatcttaataggaggttcttcttgcctttacttttataatccaggtctgttgtcattaaagtaaggaagaaacaatccttactttggcagttttccagtatactatctccatgaaaagaaacttggaattcatacaatgctggggaaaaaatggggccttaaatgtgtaacatgttttccaaagatgagaaatttactagctgataaattttgaaagaaaaatgctatataagctacttattatgcaataatgcataaaagacgacctcaaaaccttagtggtatctaacaataagcacttacttagctcatgagcttgcagggctcagaggatgtgggtctggtcttggctgatctttgctagctcacatacatctccagttagtcttgggtctattgggctgtttagrtaatcttggctgtattcacatatctggggggtcagctgactctcatatgatttatcatggccttgtgggaaggtctaggcacggcttcttcataattatggaagagggctaaaataaaaataaaagtggagatcccttagttctttataatttttttgtatcgagttgactaatttcccattaccaaagcaaaatcacatggtcaagcccagagacagaggagggacagaatgcctcaactggagtgggagggcattgcaaaactgcatggaaaggggtatggatttgtaagggttgaatatttcataacagtgatgcaatcaatgcaccttgcatattaaatgatcccattggtaatctacataattttaattagagtatgaggagaatcattctaggtcaaactggattctgcttctctatttttacctagtcactttaaccaagaagtaatatagcacaaatctattttttttctataacagtgattcacatatttgaagatgtctctcagttatttcttttgtcttcttagaattatacatcaccaggctaacttcatattttctctatttcctgcttatagtggtttccaggtctgatcattctgtttagactccagttaacttagatttcttttaaaacatcagaaccgagagcatattttagagctgtctatccagtatgatagccactagccacatgtggctattgaacacttgaaatgtgaccagcctaatttgaaatattcaaaagttagcttaaaaaattcaaaaatgatttgtgggcttcctgggcaagatggccaaataggaacagctctggcctgcagctcccagtgagatcaatgcagaaggcaggtgatttctgcatttccaactgagatacctggttcatctcactgggactgattagacagtgggtgaagtccacagagggcgaggagaagcagggtgtggtgtcacctcccccaggaagcacaaggggtcagggtactccccccgtagccaaaggaagccacgagggacagtgctatctggcccagatactacacttttcccatggtctttgcaacccayagagcaggagattccctcaggtgcctacaccaccaggaccctgggtttcaagcacaaaactgagtggccgtttgggcagataccaaactagcttcaggagttttttttttttcataccctagtggtgcctggaacaccagtgagacagaaccattcactcccctggaaagccagggagccgagtgcccttgctcagcggatcccaaccccacagagcccagcaagctaagatccacaggcttgaaatactcgccgccagcacagctgtctgaagttgacgtgggaagctcgagtttggtggagggaggggcatccgccattactgaggcttgagtaggcggttttcccctcacagtgtaaacaaagccaccaggaagttcgaactgggcagagcccaccacagctccacaaagccgctgtagcaagactgcctttctagattcctcctgtctgggcagggcatctctgaaaaaaaggcagcagccccagttaggggcttgtagataaaactcccatctctctgggacagacacctgggggaaggggctgctgtggatgcagcttcagcagacttaaaccttcctgcctgccagctctgaagagagcagtggatctcccagcacagtgctggagctctgctaagggacagactgcctcctcaagtgggtccctgacccccgtgcctcctgacagggagatacctcccagcaggggtcaacagacacctcatacaggagagctccagctggaatctggtgggtgcccctctgggatgaagcttccagaggaaggagcaggcagcaatcttaactgttctgcagtctccactggtgatacccaggcaaacatggtctggagtggacctccagcaaactccagcagacctgcagaagaggggcctgactattagaaggaaaactaacaaacrgaaagcaatagcatcaacatcaacaaaaaggatgaccatgcaaaaaatccatccgaaggtcaccaacagcaaagaccaaaggtagataaatccacgaagatgaggaaaacccagtgcaaaaagcctaaagattccaaaaaccagaatgccccttctcctccaaaggatcacaactcctcaccagcaagggaacaaaactggagagagaacgaatttgatgaactgacagaaataggcttcagaaggtgggtaataacaagctcctccgagctaaaggagcatgttctaacccaatgcaaggaagctaagaaccttgataaaaggttagaggaattgctaactagaataaccagtttagagagaacataaatgacctgatggagctgaaaaatatagcatgagaacttcgtgaagcaaacacaagtatcaatcactgaatagatcaagcaaaagaaaggatatcagagattgaacagcaacttaatgaaataaagcgtgaagacaaaattagagaaaaaagaatgaaaaggaacaaacaaagcctccaagaaatatgggactatgtgaaaagaccaaacctacatttgattggtgtagctgaaagtgacgaggagaatggaaccaagttgtaaagcacacttcaaggtattatccaggagaattttccaacctagcaagacaggccaacattcaaattcaggaaatacagagaacaccacaaaaatattcctcaagaagagcaaccccacgacacataattgtcagattcaccaaggttgaaatgaaggaaaaaatgttaaggtcagccagagaggaaggttgggttacccacaaagggaagcccatcagactaacagcagatctgtctgcagaaacctcacaagccagaagagaatgggggccaatattcaacattcttaaagaaaagaattttcaacccagaatttcaaatccagccaaactaagcttcataagtgaaggggaaataaaatcctttacaagcaatccatttacaagcaaatgctgagggatttggtcaccactaggcctgccttacaagagctcctgaaggaagcactaaatatggaaaaggaaaaatgagtatcagctcctgcaaaaataaaccaaaatgtaaagaccattgacactatgaagaaactgcatcaactaatgggcaaaataaccagctagcatcataatgacaggatcaaattcacaaatarcagtattaaccttaaatgtaaatgggctaaatgctctgattaaaaggcacagactggcaaattggataaagagtcaagacccactggtgtgctgtattcagaagacccatctcatgtgcaaagacacactaggctcaaaataaagggatggaggaagatttgcccatcaaatgggaagtaaaaagaaaaagcaggggttgcaattttcatctctgataaaacagattttaaaccaacaaatatcaaaaaagacaaagaaggccattacataatgttaagagctaactaccataaatatatatgcacccaatacagaagcacccacattcataaggcaagtccttagagacctacaaagagacttagactcycacacaataatagtgggagattttaacacccactgtcaatattagacagaycaacaagacagaaaattagcaaggatattcagaacttgaactcagctctggaccaagcagatgtaatagacatctacagaactctccaccctaaatcaacagaatatacattcttctcagcaccaatagcacttattcgaaaatcaaccacataattggaagtaatacgctcctcagaaaatgaaaaagaacagaaatcataacaaagagtctctcagaccgcagtgcaatcaaattagaaytcaggattaagaaactcactcaaaaccacacaactacagggaaactgaacaacctgctcctggatgactactgagtaaataatgaaattaaggcagaaataaataagttctttgaaaccaacaaaaacaaagacacaacatatcaaaatctctgggagttttcagagggaaatttatagcactaaatgcccacaggagaaaacaggaaggatctaaaatcaacaccctaacatcatagttaaaagagctagagaagcaagggcaaaaaagttcaaaagctagcagaagacaaaaaataactaagatcagagcagaactgaaggagagagagacacgaaatacccttcaaaaaaatcagtgactccaggagctggttttttgaaatgattaacagaatagttagaccgctagccagactaataaagaaaaaaagagagaagaatcaaatagacacaataaaaaatggtagagaggagatcaccgctgatcccacagaaatacaaactaccatcagagaatactataaacatataaacacctctatgcaaataaactagaaaatctagaagaaattgataaattcctggacacatacaccctctgaaggtaaaaccagggagaagttgaatccctgagtagaccaataacaaggtctgaaattgaggcactaaattaagagcctaccaaccaaaacagcccaggaccagacagattcacagccgaattctaccagaagtacaaagaggaactggtaccgttcctcctgaaactattccaaacaagagggactctgccctaactcattttatgaggtcagcatcatcctgataccaacacctggcagagacacaataaaaaaagaaaatttcaggccagtatccctgatgaacatcaatgcaaaagtcctccataaaatactggcaaaccgaatccagcagcacatcaaaaagccatgatcaagttggcttcatccttgggatgcaaggctggttcaacatatgcaagtcaataattgcaatccatcacataaacagaaccaatgacaaaaaccacatgattatctcaatagattcagaaaaggcctttgataaaattcaacaccctttcatgctaaaaacactcaataaactgggtattgatggaacaaatataaaaataatatgagctatttatgacaaaccaacagctaatatcatattgaataggaaaaagctggaagctttccctttgaaaaccggcacaagacaaggatgccctctctcaccactcctattcagcatagtattggaagttctggccagggcaatcaggmaagagaaagaaataaagcttattcaaataggaagagaggaagccaaattatctctatttgcagatgatgtgattgtatatttagaaaaccccattgtctcagccgaaaatctcattaaggtgataagcaacttcagcaaagtctcaggatacaaaatcaatgtgcaaaaatcacaagcatttcgatacaccaataatagacagccaaatcatgagcaaactcccactcacaattgctacaaagagaagaagatacctaggaatacaacttacaagggatgtgaaggacctcttcaaggagaactacaaaccactactcaaggatataagagaggacacaagcaaatggaaaaacattccatgctcatggataggaagaatcagtatcgtgaaaatggtcatacttcccaatgcaaatcaaaaccacaatgagatatcatctcatgccagttagaatggccattatcaaaaagtcaggaaacagcagatgctggagaggatgtggagaaataggaatgcttttacactgtcagtgggagtgtaaattagttcaaccattgtggaagacagtgtggtgattcctcaaggatctagaaccagaaataccatttcacccagcaatcccattactgggtatatacccaaagggttataaatcattctgctataaagaaacaggcacaagtctgtttactgcagcactgttcacaatagcaaagacttagaaccaacccaaatgcccatcagtgttagaccagataaagaaaatgtggcacatatataccatggaatagtatgcagccataaaaaagaatgagttcatgcccttttcaggctcatggatgaagctggaaaccatcacactcagcaaactaacacaggaacagaaaaccaaacactgcatgttgtcactcatatgtgggagttgaataatgagaacatatgggcacagagaggggaacttcacacaccagggcctgttgggggtggagggcaaggagacagatagcattaggagaaatccctaatgtagatgacgggttgatgggttgatggatgcagcaaaccaccatggcacatgtatacctatgtaacaaacctgcatgttctgcacatgtatcccagaacttaaagtataattaaaaaaaaaaaaaaacatttggctgagcgtggtggctcatgcctgtaatgccagcactttgggaagccaaggcaggtggatcacctgaggtcgggagtttgagaccagcctgaccaacatggagaaaaccctgtctctactcaaaatccaaaaattaggcgtggtggcgcatgcctgtaatccccactacttgggaggctgaggcgggagaatcgcttgaacctgggaggcagaggttgtggtgagccgagatcgcgccattgcactccagcctgggtagcaagagcgaaactctgtctcaaaaaaaaaaaaaaaaaacctcatgaataaytttatattgaaaaatgttgtaataataacattttggctatatcatgtaaataaaatatattttgaaattaatgtaccctttttcttttcactttttaaaaaaatgtgactactagaaartattcaattacatatatagtttcccttatatttctataagatggcatagacttccatgttgcctactacctctttttagctagagtctatattttttctgctgttattacattgtgttattttttaacacatgtatcagatgtttggcacatataaatctcatggtcagctaagaccttcaaattattctcatagacatgattatcaggtcatattgttccatcctgcatttggcctctctgaaactaactgctagactttgtatactaattaaatttgtgtattctctgcccttaagagtagttgggttgaagactctacatattttttcctctcaaatattattttaatgaatattattttaatgatctggaagtcctgaattttagttctatttctactgctattattcaaattcggagagacactgtttaatctgtgttttttaaaaaattgtaaaacattagattgccctttaataacatctaacttcaaaattccatttttctgataaatgaattcttatttctgtgatgtttgatagattatttccttaagaataaggggcctgaaatgaaagaaagatcgcaactttccttaggggataactattatcagcggtttcctggttggtaaaccagcttgtgggggtgggagatgatttgtaacatttgctaatttctgtagtgtagcttctcccaccatcttaaccaatttcaagcatcagctggcttgcaaaattctaggaaatttaaaaatcaactctctcaaatcaataagaactagctttagtacacccatttattttgagctgtatattttttccttgattctgcctgcccagtagcaaaagtcttgttcatccttcatgatgccaattgaacatgtttcttttttctyttcctactgcagccatcataattgagaaatgcatagcttccctctgctacaactatctccttgattattgcatgtaatcttcaaaatctttccttacatacctaactggcctcacgtctctgtttgctcagcaccagctatggttgtccttgcactcctccatgaatgtggctttgttcaatgtgtccctgtacccctatttcctgtctcataataaatccttcccatgmttaccaggagttccgaagttacatgtccttcctaagttctctcttgaccctcttcctcccatgtaatttttcctttctcttcacatccatgaaaaatatccactatgattttcatttgggccttcatcatgtgccacctcataatttatgtcatattattttaacccttgtattgatacttaaacaattcatgatttggttaacttcctatgtttcttgcacactgtcctcagtctagggactgtttgccacacttctttgttcactctaaattaacttgtgcagtactatgtacaggggcaccttgcgcttccaactttacctatgttatctagccttgtcgctttggactactcacttcattttccagagcctcagtttccttatctctaagatagcaataatgatattttcttttcaaaatgattataagaatacttatgatatagggaaaataactttcataatgctggtacaataaacttatttgtggcattacccaatttattatagcaggtactcaggaagtatgtcttcatgaagtgtgtggagagtagaattatagtaaccagaggctgggaaggggtgggggccataaagagaggttggttagtgggaacaaagagacagttaaatagcaggagtgagttcttgtgtttgctaacatactagggtgatgatagttaacaacaatttattgtatatttcaaaatagctagaagagaatatttgaaatgtttccaacacgaagaaatgatgaatgtggctwggtgtggtggctcacacctgtaatcccatcactttgggaggccgaggcaggaggatcacgtggtcagggatttgagaccagcctggccaacatagtgaaaccccgtctctattaaaaatacaaaaattagccgggtatggtggcacacacctatagtcccagctgcttaggaggctgaggcaggagaatcgcttaaacccaggaggcggaggttgcagtgagcccagaccacgccattgcactccagcctgggtgacagagtgagactccatctcaaaacaaacaaacaaacaaacaaatgttgactatttgaggtcatggatatcctaaataccctgatttgatcactacacattgtatacatgtatcaaaatatcacatgttctccataaatatgtataattattatgtatcaataaaaatttaaatacataaatagaaatagcaaactaatataacaaaagtaaatttaggtttgttaatattttaatatggaccatagtctatcaacaatatgttatgtattcttttctctttataaattctttatagaacatcctgcaaatccagaccatacacaataagtatttgagtgactcgaatccactaaaagttgggtatattagaatctggggtgtgaatacctatgtgacacaagtcagtttcacctatgacaaccggcaatttatggagacaaatttcaagagtgaaccttataatcaggtaggtctgaaaggaatattagcatatcacaagtaaattttatcattctgcaaaattatcaccaataattttgctaacaattaaaattatcattgttaaattttcatgtattagatggttataaatacgtgcaatagatatgttcctgaaaagttgcaaatgttgaatcatattgtaaaatatgcaacattaatggtctttccagtatggcctaggggtcagtgatcactggcctgatgagatcctctccatgtatttaccaaagagactgtgctatgttttgataggttagtcttccacattagcaaaataaaacttatttctgctgcagaggctaaaacaaaggaaagggtgattccctaaagctgttgaaggttgcccccatgcttcctgcagttattcatgtccctggtcaaattgatggatcttataggtagacgaaaattggcagtaaactgtggtaatcttcgaatgaatacatcccacctgtggtataggataaaaggttgataaaacagggggacataaatagcaggccctactagaggattctagaatcaactaaaccagaattttggaagatgaaataccaatagttaccaaaggcaaccacaaagaaaaaagtatctcacttttagaacataagacaacataaatacggaaccagcaacccaaaagggatggtttagaaaagtgaaaatggataaccatagttcttgttttctaaaacgtgaaatgagtgccctgatggtatttggactttggaaaatggcccctctgagcactcaaatagatcttctccctctaggctcttctgggtatttaccttaaagcattttacctggactattgagttcaaaaccactctttgcaagtaattgcttctagttaagattgtgcagaaaatccttgaataccttctttttaaaaactctatggcatatctgatgcctattatgtgccagacaccatactgtttgaaatgaggaaaacatgaaacyaacctgctgtcaagaggactaaaacccaatggcaaagcaaagagattttaataaatgttggttttaatcacagctacaaatatttgtaaacaataaggttctgactaaatgaagtgaaaagaaaagatttccagcatagggattatgcacacagagcatctctctgtatttatctgaccaaaatcaacatgacctaacccaaaaaggaatgtttatatcctattactggaaaggaatgaatccatcattttttgttaaattgtaatttaagaggtgagctacatgtgaggtttaagaagttctaaaatacccatttatatctcttcttttctggcagatactaactattcaattgactgacaagactatcaacctggaaaagttaactgaggttacttggattgatggtggtcctgtacttcctactccaactaagacaagtaccatcccaatgagttctcatccttctccatctactaccaatgccaccagttctgagacaatcaccagttctgccagtgcaaatactaccactggcactactgatactgttcctatcacaaccacatctttcccaagtactactagtgttacaactaatactactgttcctgatacaacttctcctttccctacaagtactactaatgctagcactaatgctactgttcctatcacaaccacacctttcccaacaagtactattggtgttacaactaatgctactgttcccaatacaactgcccctttcccaacaaatgctagtactgctagcactaatgctactgttcctatcacaaccacatgttttgcaacaagtactattggtgttacaactaatgctactgttcccgatacaactgcccctttcccaacaaatactactactgctagcactaatgctactattcctatcacaaccacaccttttgcaacaagtactattagtgttacaactagtactactgttcctgatacaactgctcctttccctacaagtactactagtgctagcactaatgctacccctgttcctatcacaaccacactttttgcaacaagtactattggtgttacaactggtactactgttcctgatacaactgctcctttccctacaagtactactagtactagcactagtgctactgttcctattacaaccacaccttcccctacaaatactgctgatgctaacactagtaatactgttcctaataccactatgccttctcctacaagtagtactactgtgagtactattgctaccgttcccatttcagtgactccttctctgacaagtactgctgatgccaccattagtactactgtacttattgccactacttcttctctaacaggtactactgatgttagcactagtactactattaataatataagtactcctgttcaaacaaatactactaatgctagcactagtactaatgttgctaatataactgctacctctcatacaagtactgatgatactgttcctaataatactgttccagttacagctattccttctcttgcaaatactggtgttgacactactagcaacagtttttccattatgaccacttctttctctgaaagtactaatgctatgaacactactgttattatggcaactacttctcctacaagtactgatgttgctagcacaaataatgatgcttctatgacaaattttcttttagctacaatgtctgctggtaatataactagtaatagtatttccataacaactacttcttttggtaatagtgttccttttgtgactactccttctccaagtactgatgctactactacaagtaataatactaatcctggcatgactacttattaccagacttctcctaccattcctacccatactcttacttctattcctagctctattacttctattttgagcatgtttccaacaagtaatacattcactactgataaaattactaattttactacccctacaaatgcaaacaccattattttcaacactcttgatacaaaaagtaccatggtaatagatgctacggtcactactaccagcaccaaagataataccatgagtccagatacaacagttacttccatagacaaattcaccacacacatcacacagttcgctactccccattctgctactactacaacactggccttaagccacacctcattagctcctacaaatctttctaatctaggcaccatggatattactgatgcagataactccagcagtgttacaggtaacacgacacacatttctgtttcaaatctcacaacagcctcagtcacaataacagccactggtctagattcacaaactccccatatggtaataaattctgtggctacttatttacctattactgcaactagtgctaccacagatactacaaatattacaaaatatgctttaaatactaccactcctgatagtacagtacatacctctgctactgcacctacttatattgcaaatgccataaatgctactcaagttccatgattactactcaaggcaggatagttacctcagataacgcctacaaacaactattacagatatagaaaatcagttacgagacactctatctatcttatgctacttaagttttcacggatattagtactctagccataaaagacacagctactccaaacactctcgtcattgcagacatgtttaggaaggtttacaaaccttataggtttcaccaaagaagctgtgggtacttattttgcaaccatagtatgtgctcttattcttttaaattatagttattactcctataacctcatcagttaaactacagatgttttatatatcctatatatccttgctacagatttcacaggtaattttggtatctcagataacaccacattaggctctgtaaatactattgccttagatttagttactgaaatagcccaacttgtttcttgggtcacatgacgtaccataactgagagtactggtgatacccccagcactcaaatggtttctataccaacagttattgatattacaggagagtatgtaattagtaatgctaaaaaaatgcactttattatcctatggacttttccaaatgccatagctaccaatagagtcatttgcattacacatactaatagtattatttcttctgaggagatcctagctgtagctacagatatagaaaattctaccattgaagatcttgtataaccttacttcagccactgaaataatttaaattataaatattacatgtgggtttgactatcacagaaaataaaatgattatagatcctaaaaacataaattcctgaactttgcaaccattaattcataggtactactaatactcttactacagattttataagtacttccacttatagacagaagagcattctcagaaaattagaattaatctaaattatgagatagtcttaaagcctcactgttaccaccaatgactggctctgactctagtataaatcagaaattatccagacagaggtgagaatgtaaatatacagcatgaggaagacagcctccacattggaatcagagttcataatcttatttgcattttcttctattaatacaagcttttcccttataatttcactgttcagactccccttcattgtgttagggttttcagtctattcctggtttttcatatccaaattcatcatccatccttgatccattgttttcttagatcactcaaacccccatgagtagacccatggtcattaccaaatctggtcatttgggtactattgtaggtttaaccctagggcaatattctcgaagtttagttcagggatccatggggttccccaagactttctggagcacacagcttcttcaaatctactttcataatgatgctaagttatttgttttttcagtctcattgtctcattagtatayagtggcactgtccagatgctctatgctgtattgtgtcataaaagatgaatatagaaaaagaaaaaagaatctagctgtattctattaagctagacattaaacagatttacaaaatgtaaaataatgtcattcttctaatttttttttgctttgggaaatacagwtatttttcattaaaaacatatttatgttatcacaaagtgaatatgttattttttatgaatgaaaaataaatatttaaaaaatattttacaaatgactcaattttgatttctaatgcagtaaatattagcagatataacccacataaataaagcacagtgccctcaccaattttgaatgtaaaggggttctgagactaaagagtttgagaacaacttcctttaagtgggcagaaacatcgtatttccactctcatgtcctggtcaagtatattatcaacttccccagcatgtaggtactccagcatctgtggcttactcaacatgaatatctttccactgtctacaaacacatctacccagctttttgatctgtcagcccagctgtactattgtccagacaatttgatggtactccagatgaggggcacagattcatcagtcagcaacatttgcttttggaatctgcccacaagctacagtcctctgaacaaagttgatagaccttattcttgtgtatacatgactcttgaccttccaactcaaaacaaaactcaaaattctatgggcttggtcagactccctcrcttgtatctttactgagggagacttagtgcatttgtcttcttggcatcacaaactctgatacaggacaaagtgctctgtgtgatagggcaccatgagattctgctgccaggccaccatacattgctcattcactgaccaacaacttcattaaagcagctgggatttggaaaactgaagatgaatctgcttgaacaagcatagttctgaagccaccaaagtccaacctcttaagtacgtaaatggaacataattgaaagcatggaattttgaaaaggtaagaaatactttgaatatacaaaagtcttgactttggtcagatgtttgaraagacttgagaattgaaactcaggagtcaatgcacaagtagtggtcctggaaccaggttcagaaaacatgagggcaatgttgacatgctaattctaccattgacaacactagcaaaacctgtgcatggactctgatttataaggtctagagaaacttctaagctccataatgactggccccgctggktcacccacatgtgtgatattaattctgcactaatgattataacttatgttctaagtataaagaaatttacttttctacacttctggtacttgacacattcctacctttaccattactgtggacatcattatttttacacctaaaatttctagttattaatttaaacttcagtttctagtattccaagcatcgctatgtaaacactattcatgttgactatttaagagatgtcacacatactgcatgattaattttccagtgaggaatatagatgacagatgttttggattaacaggaaactcactgggagtctaaaggtatttaggaatacttcaaggagtaagggaagctgggaggtaccctgtagcacaaaaaagagtcaagaaaagcctttcaggtggggaatgcactggacaaagagactgactttacatggtgtgattaggagatataaaatagtccactcttttctacagcaggagcattgtgagaagagacaagatttaaagtttatcaagttccatcaccaaacttccgtgtatatgagattagacattcaaatgagggttgaaagagcattcataccagtaaaggaacttacagggctagagaatgctttggtttccacatccctttccccatgggagagtggagtggtgctctgtgtgaagggcactgcagaagaagtgctcgatggagattaagagtgcctgtgaggagctgggactggcatctcactcccagctgggcactcgctgaactgagaaactcttgcctctcttccccatcagatgatacagtggagcatggagcatgggcaaggtttcagaaacctcatcatgcatctcccagagtgtggaagccaatgaaatcacaaagaatggcgctagagtcttgcccagagaattccaaaagtggcagakattggagaccctgcagtagtggatgcagagccagggaagtagtggtgcatcctggactcaacagtgttcaatggacaaggaagctgaagctcctcaggtgggtgtggggagatggctgggctagggctgtcatgaagcaatctgtccagtggagaagggactctagtgatgagaggtcgtggatggacttccaagagtggaaactaagtttgtagtggggagaggtcaaaataggtcatgcagattgcatctcacctcatgttagatgctgcacaaggggcctctgaaaaactcactaatgtgcccatgggaagaaatcagcactggggtcctctcacactgagggtacctgcggatgccttgccatagcatccatcacatgggaacctttgtcttttcctttaatttccatctggctgtgaaggatacccagaaacagtcaaggaagaggagaaggagaatatggaagtgtaaaagcatagaccgtaatccccttcctcactgctggaggtggtctctgcggaaggagaaaacttgacatggatgtgaaaatgacataccgatttagatgatacaaattcttgaaaacttccaaatgaccagaaagtgatgaggtctgttgacgggataagaaaagaatttcaactcagcattgaggaagaggggctaagattaagaaaaaatgaaaagcttgagaatgctgaaaagacacacactgcctcatttcacattgctcttacctgttagaatgatgggtgaacattcatccttaactttgtaatgctttataaatctcttattccaaggaaaagtggagaatggcttggagtacaaaagttagatctgggccccaaaggacgtttgaggttttctcaccttagccaatctctggtggcttcagagaaggtggctttggaaattttttactatgtaattgagaaaagtttggctcaagagaagaagtaaaggggtctgtacaacctatgggtcttgttacttaaaaacaacttcttatatttgcacaataatccatagtttgcaaagggcctcacataaatgttttattttgttccactcctgctgtgaggcagagagggaagaaatctttacactttttttctcagaggcagaaaggaagacttagaaaggttaaatgacttcttcaagaacacagagtcttaaaacatagtagagcttggccttctgattcacttcctattacccgtctgcttcagggtcccatctcctgaggaaagtccatctttgccatgatgtgatgaactaaaataaaataaacaaaaacccacttctagaaccaaataagtcttgtaaaagagtcctgatattattcctatctatttacgtgacctggatcaacttgcttgaattatctgagccttatttaattccttcattggtaaaatggaaggattgagagagtgcctaggaaaatatctagtgtagcaagaacccataatttggtattctttttggcatatcaaaacatcttgtaaccttgaatatatacaattttcatttgtcaattatacctcaataaagctggaagaaaaaaaaagagctgactactctattccttactgctaatacaccaagatgatacgtctggcttcctaggtcctctctcccaaattcttccctttttgataataattttaaaatgaacaataaatagataagttgtggtgaggttgccaatgtgttagaaacattgagtggaacttacgaaaaggaaccccttatgaaagttgtaagattcaaaatggagtcacttgtgccaaaccctggcaaaatagagttggggaaggtcctgaagagagggctctcacacaatttgtctgataacaggaactatcacaggacatttttccaaactgcagctttttacatgagtcacgccaagacagctagctgcctacacaagaatacttgcctgacacactgtctcacaaacctaatccctgcaagggagctacagtaacttccaggttacaaatcccacctagcaactatagactgttgccaatcacaactcgccagctcttgtaagacactgctagtgccaatgaactttctttcaaaacgacttgcataaccttctctttccccaataaaactctaatgtttttctttgttctctggatatagcagaggccaccctgttgtgcctgtatcccaaattgcagttctgttttcacattttaattccaaataaaagttctgtgctttgggaacatctctacattttttcttggaagttgacaccctttaactctgcctttgctttccttcttaccctcttttgctgggtggaaatgtggagtcagacagtagcaatagtgagttggctctagatgcccacaacaccttggagggggagctggagagcagctctgcatgcagaaagtaggtgtgggcggagtagctctgtcatgtgcctccacacaggagtgaagcttgacatggaacatggtcaccatatgccatttgcgcctccctctaattcaatgacttctcaaaaaaaccaccattttaatatatttattattcatttttaaatttccttttacttaaattactaatgcattggcagtttttgtagatgaagattcttatttattgactgtctacaaaaataaaattgtaatctttcttaataagaggaaaacccaaatttttgagggtgagctatgcaaagagcctcttcagggtgcatgtgtttggacatagaggtcgcagtagagggagaattgacagaccttgtggtcctaaatcttcccctgggaggttaattgctccttagtggtcacttactgataaatggcacctccatatgctgacatcaggcagaagtggagtgctgatgcaggacaggcaagcccccaaattggggctcagccagacagggttcttggctttccccaggaaagaattcaagggcaagtaggtggtgctaaacagaaacttttactgaagtggcagtgcatagcagcagcagaggcagtgcttcctgtggaacagggctatgctgtaggcagtgcacccagagtagcagctcagaggcagttctgcagcctcattaatacctacttttaatcacatgtaaattaaggagcaggttattcagaaatttctagaaaaggggtggtaacttccaggtcattgtcatggaaagggttgtaacttctggctgttaccatggcaatgccatggcaatggtaaactgggaagaggtcgastgacatggcattggtggatgtgtctcagggagagatgcttttgcctcttcactatttcagctagtcttcaaactggtctggagttcaagccttacctcagtgctgcttccaatactctgtccaatactgattgttatctttctcttattttagagtgcagttgagataaggtggaaccactgaatgttttaggaaagcatactagacaggaaacaagagtataagaattatgatcattttctctgtaaggtaaaatccatcctttcttcctgagttctcagagaaaggatgtctgagctatgtctgcctgtgaattagtccatttttctctttcttaggtcctaactttcttcttcctttccagagggcagtcccaacaagacgacaattagttatttgaataaaagggcagtttcttaaatctactaaagatttaatctactaaatttaatctactgaagaccctgtgctaaacattttaattctataggcatgtgaaatgacagaaaaacaaaactgttgttcagagagttaagcaactggtctgatactgtttatcaggttaagtgttggagaaacgattacaatgagatctgcctgcctgtaaatagcattataatttcaaacttcccctgaggaagaaccttggggttcctaaaagctgctttaggatgagggaaggtcaaactcttccttcccagttgtatcagaattgctttgttttttgtgttttctcttctgtatttttgcataagattttatttgaagaaagggcatcattgcttaaaaaaattgaggaaaaccaattctgaacaatgccatactttcgataatttctgctgtatgagttagacagtattttgtgggctagctcaggaacctaaccaacatgcattctaagtaggaagcatattacctataaatcagctatcagaacacaatctccatgtaatctaaatactttatgtcaggatacaaagatggccaaattgaagaaatccttaaagcaaatgttgggagatgaggagaagtgaatgaaagtctcttcctcatgatggcgggagatacctggttctcaggagagggaagactacagagcttgtctgggacttaggctgccttggcctctaggacttgccccatctgttgtgcaaaggatagactgaagaaacagctctactgtttttgaataacctctttactacgacctgttactctcctgtcatggcaacccagagaagcatgggatttttttttccattacatgatgttttccatttaatgggattataatatgaactatgcatttaaaggtagtattctccattttttccaagtctttgtttttttatttttattcatttatttaaaaatacaatttcaatttcattttagattcagggtgtgcatgtgcaggcttgttaccttcgtatatcatgtgatgctgaggtttggtgtatgactgatcccaccacacaagtagtgagcatagtacccaacagttttccaaatctcatccccctccttccctccccactctagcagtccccattgtttgttgttgccatctttaggcccatgaatagctaatgtttagctcccacttataagtgtgaacatgtggcatttgcttttctgttcctgcattaatttgtttagaattattgccaccagcttcatccatgctgctgcagaggacatgattacatcctttttatggcttagtattccacggtgtatatgtaccaaattttctttataacaaggaatttttgaacttgtcatttgtggttgtgtagggaattaatcacattgtatggggaatgatgtcttaggcaaaagtcagcttgatagctatcatttacattattttgtggcattgtactaaatgtattacatgtgttatctaagtaaatatgctgaatacaagtccaggaatcttttcacttgattggacttggcttttacggaattttcccagacataagggaaaactttgtggcatagcatttaataattctggctctgccatcagatgacaagggttcaaatctcacctctgctacttaggaacttgccatcttgtgataattatttaacttatataagcttcaatgtcctcatttataagatggaaataatgtagtatttctttatatttctagtagtactttttgttttttttgatacagagtttcgctctgtcacccaggctagagtgcagtggcaccatctcggctcactgtagcctctgtctccaaggttcaagcgcttctcctgcctcagcctcccgagtaactgggattacaggcatgcgccacacatccaactaatttttgtatttttagtagagatggggtttcaccaggttggacaggctggtctcgaactcctgacctcagatgatctgcctgcctcggcctcccaaagtgctgggattacaggcatgagccgccgcgcccggccagcagcttgctacttctgagtcctgagttcagctggctcagacgccagatcccaatacatatagcagactccattggacctgcactaagagcaccacctgtaggggctgttgcttcaggtggacactttttttcctttcttgcctcagttcccacatctggaggatgaggcaaacatctgaactacaataaagtacatggaaatgcattttcagtctgtaaaatgctgcacaaaggtttactattatttattattgttattctataattccctgagtgttctgatgtctattgcgggttgttttttaagttttgtttttgtttttgttttttttgtcttcctttttcttccccttggatcttctggaagcagagaagtttctctttagtgctggtgaaacaggagagttccctgattcccccctgcaggacatgtgacaagggtgtggcctgcttggtcgccctgcagctcagccccctgtagggggagcatgcagacaggcaggcgtggaggccagcatgagcgcttctgggctccggccccagggcagtgtctagggaccggtgtctgagactcccgaagcccaagtggacgtgtcttactaagctcttttagatattctgtctgcagatggcttgtgtgttaatcagcttagtggatcctctgccttatcccaagggcagtgggccagagtgacaaccttctgcatcccaagtccttgcccagtgtattggaagaatcagatcacatgtgggctcgaaggatgagtgcaagattttattgagtggtggaggtaaacgttttctctgtttcagtcagtcaacaaccgcatgtaattacttaattttaatacaaaactaggatcagagggtaggagctgcggtgtgaagagaactaagagccccttcaaatatatgggaatctaggttttctggagagctaggtactctgctaaaaagaaataaggaagaaataagaataagagatgaggaaggggggctgtgaccacaagagataaataagattatctctagccaatgactctcccatagtcagaggacgcctaaaagcagagttgaatgttgactctcagtctgctgaatacaaatccagggatcttttcacttgattggacttgatttttatggaattttcccaggcataagggaaaactctgtggcatagcatctcatgagatgaatggggagccagagaggggggatggagagggaaggtggtctt

SEQ ID NO: 94487 - DNA, 14657 bp, Homo sapiens
ctgaccccaagcaatctgcccaccttggcctcccaaagtgctggaatgacagacatgagccaccgtgccgggccaatttgcctttaacactttattcatcagctttatttacctattcatccaaaccttcatctgtctttccaacccatctaccattcactcatcgactgattcatccattcagtatctagtcctgtatctatctgtccatccaacttccaatccactcaccatttatcagtcaagatgccccccccacccaatacctacccattcacagcttggaaccaagctctatgactgagatggggacacagaaatgactctgtcttctaggattcacaatcaatggggagaggcaaataatctcccccaccacacttctctctctctctttttcaaacacacacacacacacacacacacacacacacacacacacacagaggcaaacaggaaatttccaaaacattgtgatcagtgctaaacccagggtacatccaagataaagtttgaaaagcaggccgggcgcggtggctcacacctgtaatcccagcactttgggaggctgagkcaggtggatcacccgaggtcgggagttcgagaccagcctggccaacatggtgaaaccccgtctttactaaaaatacagaaaagtagccagccaggcatggtggcgtgcacctgtaatcccagctactcgggaggctgaggcaggagaatcgcttgaacccaggaggcggaggttgtggtgagccaagatcacagcattgcactccagcctgggcaacaagagcaaaactctgtctcaaaaaaaaaaaaaaaaagaaaagaaaaaagaaaagcaggtaagtggtcgggcattcaggtgtcatacactgtgtgccaagatgaagtggccgtagggtgatgagaggtggatataaggatggcaaagaccacttgggagagggagggatggaaaaagggaggcggaagatcgcaacgtgccaggaacaagatctgggcctggggggccagtgtccaccccagccaggagacctcttgtttgcaggacctgctacaccctgaccaccccctgccgcccccacaggcagagctgacctgtccggtaatcaaggcaatgcagccggccgcctagctacagttcacgagccagttgtcacccagtgggcggtgcatcctccagcccccgctcaccccagtctcctggacaaaatggagaaagcgcctccacagccccagcacgagggcctcaagtccaaggagcatcttccgcaacagcctgccgaaggcaagacggcgtcccgccgcgtcccacgcctccgggctgtggtcgagagccaggccttcaagaacatcctggtagacgagatggacatgatgcacgcccgtgcagccacgctcatccaagccaactggaggggctattggctccggcagaagctsatttcccagatgatggcggccaaggccatccaggaggcctggcggcgcttcaacaagagacacatccttcactccagcaagtcgttggtaaagaaaacgagggcggaggagggggacataccttatcacgccccacagcaggtgcgcttccagcatccggaagagaaccgccttctgtccccgcccatcatggtgaacaaggagacccagttcccttcctgtgacaatctggtcctctgcagaccccagtcgtcccccctcctgcagcccccagcagctcagggtaccccagagccctgtgtgcagggtcctcatgctgccagagtccgggggctggccttcctgccacaccagacggtcaccatcagatttccctgcccagtgagtctggacgcaaaatgccagccatgcctgctgaccagaaccatcagaagcacctgcctcgtccacatagagggtgactcagtgaagaccaaacgtgtaagtgcccggaccaacaaagccagggctccggagacaccattgtccagaaggtatgaccaggcagttacgagaccatccagagcccaaacccagggccctgtgaaagcagagacccccaaagcccccttccagatatgtccagggcccatgatcaccaagactctactccagacatatccagtggtctccgtgaccctgccacagacatatccagcgtccacgaygaccaccaccccacccaagactagcccagttcccaaagtaacaataatcaagaccccagcccagatgtatccggggcccacagtgaccaaaactgcacctcacacatgccccatgcccacaatgaccaagatccaggtacaccccacagcctccagaactggcaccccacggcagacatgccctgcgaccatcacggcaaagaaccgacctcaggtttcccttctggcttccatcatgaagagcctgccccaggtatgcccggggcctgcgatggcaaagaccccaccccagatgcacccggtcaccaccccagccaaaaacccattgcaaacatgtctgtcagccacaatgtccaagacttcatcccagaggagcccagttggggtgaccaagccctcaccccagacccgcctgccagccatgataaccaagaccccagcccagttacgctcggtggccaccatcctcaagactctgtgtctggcctctccaacagtggcaaatgtcaaggctccaccccaagtggcggtagcagccggaactcccaacacctcaggctccatccatgagaacccacccaaggccaaggccaccgtgaatgtgaagcaggctgcaaaggtggtgaaagcctcatccccctcctatttggctgaggggaagatcaggtgcctggctcaaccacatccgggaactggggtccccagggctgcagctgagcttcctttggaagccgagaaaatcaagactggcacccagaaacaggygaaaacagacatggcatttaagaccagtgtggcagtggaaatggctggggctccatcctggacaaaagttgctgaggaaggggacaagccacctcacgtgtatgtgcctgtagacatggctgtcaccctgccccggggacagctggctgccccactgaccaatgcctcatcccagagacatccaccctgcctgtcccagagaccactggccgccccgctgaccaaggcctcatctcagggacatctgcccactgagctgaccaagaccccatccctggcccatctggacacctgtctgagcaagatgcattcccagacacatctggccacaggtgccgtgaaggtccagtcccaagcgcctctagccacctgtctgaccaagacgcagtcccgggggcagccgatcacagacataaccacgtgcctcatcccagcgcaccaggctgctgatctcagcagcaacacccactcccaggtgctcctaacagggtccaaggtgtccaaccacgcctgccagcgcctcggtggcctcagcgccccaccctgggccaagccagaggacagacagacccagccacagccccacggacacgtgccggggaagaccactcaggggggaccatgccsggcagcctgtgaggtccagggtatgctggtgccgccgatggcacccaccggccattccacatgcaacgttgagtcctggggagacaacggagccacacrtgcccagccatcaatgcccggccaggcggtgccctgccaggaggacacggtaggctccctgctggcctccttgtgtgctgaagtagctggtgtgctggcatcccaggaggatctccgcactctgttggccaaagccctctcccagggagaagtctgggcagctctgaaccaggccctgtccaaggaggtcctgggtgccactgtcaccaaagccctgccycagagcatgctgagcatggcgctggtgaaggcgctgtcctggagtgagctgcgcctgaccctgtcccgagccctgtcccggggcgagctgcgggcggaactcaccaaggtcatgcagggtaaattggccgaggtgcttagcaaggctttgacggaggaggagtgggtggctctgagccaggccctgtgtcagggtgagctgggtgctctcctgagccagtcttggtgtcgggtggccctgaggactggaaccatcctccccaaggccgcctcgaaatcaacaggaagcggggtgactaagacgccggccctggtgaaggtggcctgcaggaggagtccatcggccgcatgggggccctccctgggccccgtgagaccacagaccagcaaggtcagggattcccaggttgggatctggggttgtttcaccatgggccaacctgccgggcccttggaggagatgggggattgatggggccatcttgtgggggtcaccctgcttatctgtggtcactgtgggagcctcggtgatgggtagcgtcatcaccagcattcaccagggtcccctgatcactggcctgtatcccatgctgtcccgggagatgatggagtccagcagggacttctcctcaaacctggatttgagccccaagttccaaaaggaagaagcatgcccgaccctggagcctggcacattggcatcagattttaaccccgaggggagtggggagggccccagtttgctcaagctgtcccacatgcagccacccccgagtctgtggcagcctctcattgccaactgtgtgggcccaagcatgaaccagccctctgtgatctatggcacagccccgagctgccacaggccacatgtggtcagcagggtggcctcttatctatcgaccagggagggcagggtggcctcgggtaggcttccttgcagcgtgggtggtgggagggctgcccatgttcaccagccttacctcacctgtgggggcctgccttggtgtcagtcctcaggggtacatcgtggtctctaccaacccttagtggccagaggccagcagcaggcatccagggcttccagggagagcctggggaggaggtatcagcccccaaatcgcaaacaggcccccccgggtactagggaggtgatagacaagggggccccaagtcccttgcaggtcaccatggtgaccaaaactcaggcatccaagactcatggtctgtttcaagcttcccccggcagtgcattggctcaagttcgtcccaagacatctgtctgtggacaggggaggaatcgaacacagggttctgtgtctgccctgctctgcccccagaagctagcaacagaccaccagccatccatcctcggtgagccagtaggtggtttgccacaggatcgagacggtgacctggccaggagcttctcccagggctttgtgacctacagtcaggagaacaattccgaaagctctctgcaaagttctagttccctcagcctttccactatgtctgtggccagcctgcctgccgtcaacaagatagatgagtcacgggaaagcagtttagaaggggaccttgcggtgaagtctgtttttcctccggagtccatggggacactccagaggtttaaggatacgcaagagactgaaaccggctataggtacatgaccctacacttcccctaccggcccactccagcctcggagaaagtgcccagtttccaacacagctcagtgtctaactgcttgaccttgcgtgttcactggggctcagaggctgagatccacaagttctccttaggcaagagctctgtgaatctgattgaggtgtcccaggcaaccgtcaagacagagctgaggaggactctgtctttaggtactgtggtctccactgcatataagccaccatctgtggccaagagcttggccccaattgtgtcccaggctacactggccagtagggtagccccaaacctaggccaggcatcagggttcagtaggctggccccaagcctatcccagcatatagcatccagtaaggtatccccaaggctaacctgcccatctatgggtaattgggtgaccccaaggctaccacactcctctgtgcctaatagagtgacaccaagaccagcacagccatctgtggtgactaggaggtccccaagccgaggacacccatcaaggacctttagagtggcctcagaccaaggtcaccaatcaatggctaactgggggtcccaaaacctagcccagccatctatggacagtggggagccctcaagcctagcccagccatctcaagccyctggggtaacctcaaatctggcccagccatctcaagcctttggggtgtctccaagtccagactacccatctcagtctgttgggragtacccaatgctggctcagccatttcagcccactgaggtgtccccaagtccaacctacccatctcaggccattagggagtacccaaccctggcmcagccatttcagcccactgaggtatctccaagcccagcccacccatatcagctcactgaggtgtccccaagtgcagcctactcatatcagcccactgaggtgtccccaaacccakgctacctatctatggccattgagatgtccccaagcccagaatacccatctgtggccactgaggtgtccccaagcccaacctacccatatcagcccactgagatatccccaagctcaggctacctatctgtggccactgaggtgtccccaagcccaggctacccatctcagctcactgaggtgtccccaagctcaggctacctatctgtggcyactgaagtgtccccaagcccagactactcatctcagcctactgagatgtccccaagctcaggctacctatctatggccactgaggtgtccccaagcccaggctacccatttcagcccactgaggtgtccccaagcccagactatccatgtgtggccactggggagtcccctagccttgcccagccatctcagcccactgaggtgtccccaagctcagcctacccatctgtggtcactggggagtctccaagcctggcccagtcatatcagcgcactgaggtgttcccaagcccagcctacccatttatggccactgaggtgtccccaagcccaggcgacccatctgtggtcactggggagtccccaagcccagcctacccatctcagcccactgagatgtccccaagcccagcctacccatctcagcccactggggagtctccaagcctgacccagccatctctgaccatcagagtgtccccaagcctagccatgtcatctcagactattggagtgtccccaagcctagccatgccatctcagaccattggagtgtccccaagcctagccatgccatttcacaccattggagtgtccccaaccctagctcacccatctatggccattcgggagtctccaagcctggcccagcctcctcagtccactggggaatccccaagcttgacctggccatctcaggccactggggtgtccccaagtgtagcccaccaatctgtggccagtagggtttcctcaagcctagcccagccatctcaagccagtgggatgtcccctagacaagattacccaccagtggcctccagggtgtccccaaaccaagctcacgcatctataaccagcaggatgtcccctagcagagctcatgcatctatgacctgtatggtgtccccaagccaggttcatcgatctatgcccagtgaggtgtccccaagccttgcccagctatctcargccaccactgcagtgcccttaagaccagctcatcaacctatggcctgtggtgtatccccaagcctagcccagccgtctcaagccacagggatgtcttcaaggctagcccaccaacctatgacctgtgtggtgtccttaagcccagcccagccatctcaagccattggtgtgtccccaagcctagcccacccatcaggaccccatgggttgtctccaagtctagctcacccatatgtggccagtggggcgggctccagcctagcccacccatctcagaccactgcagtatccccaaggcaagcccaaccatctgtggcctccagtccaggcaagacaaattcatcctgtaccctagcctccagcctagccgagccagctatarcccccagcctattcccaccatctgtggcccacacggaagccctaagcctggctcagtcacccccggacactaggttggccccaagccgatcccagccatctgtggtcagtggtacatgtcatggcctcaatgagccatgctggggctctaggctggattcaaatctgcagtgttcaagggtggactcagtagccccgtgtctgtgtcacccatcagcgtttgtttcagttagcctgggtggaccatatccctctgtggctggaaatatggaccagggtctgaaccagccatccctgggtactggggtgaacctatgtgaagaacctctgatggttagtgagatggtatccagccccccggacttcaagttcaacgacgtgtcccttgggttccatcatccacccagggttggtgggaggcatgtgtgtccaccctctgtggttagtgtttcaacaccaaatctctctcatgctgatgaggaggcctgttgtgtaggccagtgaatcacgcctctgttcaggggtgtggctgtaagccatccccaggagcctttggctgatgctatgttccccagtgggtctcaggggaccacatctcctggcckagctgggaatctcccctggagaaccatagcaactggcatgggccaaagtcaatgtcaggtggccaatggcatggcttcccttgcatcccaggtcttagaggcaggtggccctttgacacatccctctggaaccacagggatggcccccagcccctctctggcttcagtgcccaacagactggccgtgactcagtctaatctttccctgaacagcatggaccccagcagctcccagatcagtgtggttattccaaaaaacatagactgctggcacccttctgaggcatccatggtcccacccagttaccagcagagagatgtgattccgcaggactctctgaagagcagggctggtcgtggtgcggcaggaggttttgtagccagtagaatgagcacgggcgcagtcccaggcactctgcctggtggcataacctccagccttcccccgggctccaccatccgaggcatgggtcacagccttcccgcaggctctgtgtccagttgggtggctcccagtctgatggcagacagaaagaagccaagtctatctgtaagaccctccgctagcttagctgctccaaacttgctcccaggttcagtagtgagtcgggtgagcccagttgtcccccctggttctgtgccaatgatgggggcctctagtgtggctcagagctgctccaaggggcccatggtgattgacatcactgcccctccttacctcaaagccctggctggggagaggtctttagcccccttgcagatgccccacaccaccagtctggctccaggtcactcctcagccccggcagctagtggcacagtgaggagtctacaccgagtgcccacggttctatcaagagccttacaattgagccaagatgctaggataatgccatctggggtcacaggggaccaagccaagctaggagaattggatgaggctgtgttccaagtgtcaggatcaagtggatccaatgacctattcagcaaagccagggtcactggtgcaacccagtggatgtactccagtcctctgggagctgatgggggccatgatcataggtccctgtctgagaaagggtctcttccccaagggaggtggctcccagccatgctagtggcatggtccctgtccctttccaggccccgggtttagccactaagtccccctcagtttatcaacaggggtctgtcrytcacgtcatacccccaaatcactctcagggtacagtggcttctaatgtagtctcaggatcaccccagctggcccgtggcagtactgaggctttcagattgctttcagtgtctgtgggcaggatggggaatcctagtcttcttcagaggtcagggaccaccagcatggtctcacatgtgccactatatccgtcctcggctagaagggcattgtccagtcccttccagacagaagctgtccccaatccactccagaaaacagtgtctggaaacatggctccgagcagccgctgggacgccatgggccctaaaaattcctacagatccgtgcatggtaggattgttccagaactgctagaaagttctgtggccagggttaggcccttacagtatgtgcaaagacaaccatcccaggcctcagcccgaagtggtgcaaaccccacccacaggccctctgcagaggtaaggcccgtcatccgcactggggagatgacacactcctcggtcattcctccgctggccccgggagttcggagggtgtctctaggctatgagtcttccccaagtggttccctgccacccctttttaaccaggagtcaccgtggagacggcaggactcctatagcccccagaatcctgccgttagtcacaaggcatccctgaactccactatactccagggccccgcggacgctggtgtggttggtggccaatcgtggaacygcgcatgggagccagccaggggtgctgcgtcctgggacacctggcgcaacaaggcggtggtgcctcccaggcggtccggggagccaatggtgtccatgcaggctgcagaggagatccgcatcctcgcagtgatcactatccaggcgggcgtccgtggctacctggcgcgtcgcaggatccggctgtggcaccrgggggccatggtcatccaagctacttggcgcggctaccgtgtgcggcggaacctggcacacctctgcagagccaccacgaccatccagtctgcctggcgcggctacagcacccgccgggaccaagcccggcactggcagatgctccaccccrtcacrtgggtggagctgggcagccgggccggggtcatgtctgaccgaagctggttccaggatggcagagccaggacagtatctgaccatcgctgcttccagtcctgccaggcacacgcttgcagcgtctgccactccctgagctccaggatcgggagcccgcccagcgtggtgatgctagtgggctccagccctcgcacytgtcatacctgtggacgcacacagcccacccgtgtggtgcagggcatgggccagggcactgagggccccggggcagtgtcttgggcctccgcctaccagctggctgccctgagtcccaggcagccgcatcgccaggacaaagcggccacagccatccagtccgcctggaggggctttaagatccgccagcagatgaggcagcagcaaatggcagcgaagatagttcaagccacctggcgaggccaccatacccggagctgtctgaagaacacagaggcgctcttgggaccagcagacccctcggccagctcacggcacatgcattggcctggcatctaggaccctggctccctgcagtggggacttcgtgggaggcactcatggctctctgggtctaatgaataaagtcctccacagcctagatcttgggtgatgtgttctgggttaatggaagtggcttgggtatagtgggggaatctggaacatcccagagggaagagaactctgaagttaccaaccatgcagtatgcatctggggtctgtggccagcatggggacctcaaatctttcctggaggtcaggcactgccaatgtggtctcagctgtgcctctgccatatccacgtacaggtagtggggtggtgtccagcccgtcccagatggaaactgtccccagtgcactctagaaatgtgcctgggacctggcccagagcactcacctcaagtccctcacccctaaaaaatcctacaggatggctgggtgtggtggctcatgcctgtaatcccagcactttgggaaaccaagacgagtgggtcacctgaggtcaggagttagagctatcagcctggccaacatggtaaaaccccatctatactaaaaaaaaatacaacaacaaaaaaaggccaggcacggtggctcacgcctgtaatcccagcactttgggaggccgaggtgggcagatcacctgaggtcagaagttcgagatcagcctgaccaacatggagaaaccccgtctctactaaaaatacaaaattagccggccatggtggcacatgcctgtaatcccagctactcaggaagctgaggcaggagaatcgcttggacccgggaggcggaggttgtggtgagccaagattgtgccattgcattccagcctgggcaacaagagctaaactcagtctcaaaaaaaaaaaaaaaaaattagccgggcatggtggtacacgcctgtaatcgcagctacttgggaggctgaggcgggaggttgcttgaatcccagagtttgagaatgcagtgagctgtgattgtgccactgtgcttcagcctgggcgacagagtgagaccccgtctcttaaaaaaaaaaaaaaaaagggctgggcacggtggctcatgcctgtaatcctagcagtttgggaggccgaggcgggtggatcacttgaggtcaggagttcgagaccagcctggccaacatggtgaaaccctgtctctgctaaaaaatacaaaaattagccaggcctggtagcgggcgccagctactcgggaggctgaggcaggagaattacttgaacccgggaggcagaggttgcagtgagccaagattgcatcactgcgctccagtctgggtgacagagcaagactccgtctcaaaaaaaaaaaagaataaaagaaagaaaaagaaatccataatagaaatgctagaaggttagaaggtttcagtcatgtccccaaaaggccccagtctgggtgagacagaggacagaggaggacgaggacagagaacaaggacatccccagccctgtgggttcagggatcggagggaggtgggagaaattggtgctcccagaggggacaacctggctggacgaggggcagagggagtgacagcaggggtttgggcagctgtggaaccaggagcagggggaaagaggacggcaggggcagggtgtctttagtggatgactggctttgagagcttctgggtcgtcgtgtttagaaggggtggagtccaggtgaagagggcgagaaccgcacccgggggaacaggagcgccccagggaggtcccacaccctgcagccccacctgcgccttgcccctgcacagccccgcgctccgccagcagggagcgcacacgcaggtgcaaggagctggcacctgggcacacacctggccacacacctgtgcagagccggtggcaggccctcccggcgcaggaatggcgtgcccccagctgccgccacttctgcttttggtgctggtggtgctgctgaaagctggtgtgaattacaatactccctttacaggtaagagctggtaaagaggctcagcttccagaaagcggaagggtgggggtgggggacgcacagcccagtcacacacctggcttctggacccctccctcaggccacgctggtccgccaaccctccgaggaaggctggcttttcccccagaaacaaacggagcagctgtgaggacagatgaggcaccgctgctcccaagccctggggctgtgggtcctgcaactccagtgagccctgaacctgctggaggccacagatggcctcacacctacttttgggctccttttcaaatctgttgcttttagccaatccccaaagggagaatggtgaagacctcagggccatgggggttccagggaacagggactcacttcctggtcatcaaacatctgtggttcccatgagaagttcttctgggtgtctgacttaattccctcttgctctcctataagacagtgcctagggtggaggggaggagccttgagcttctcgcattccctttttctgccctttacctgccactatgttgtcactctctctgaccggtgtcctaccccacagacctgtaatagcagagcagaggccaccatggctgctgaaatgctcattgcagggaagggtttcattcagaaggcaccacttttatccccatttcatagctcaggaaactgaggctcagtccagcttgtcccagacccagattagaactggttgacttggctcatgtgagcctcccagtctaggagtctctggggagagcaaacacccagcacagtgcctagaaacatctttatttttaccttctggtcaacccttcagcagctcaccagtgcctactcagtgccaggcactcaacagggcttgtgtcctccaactcttcctttttcaagtccacagcttttcctcagttcactaagcactcagctccccagaattctgacttggcttggggtccactctggcctctgaatcatcttcatttcagcagaaacagaggacaagggtccttgaggggcgttcttcccagctccccagtcacctcaggccagaccctctgctactctgagcctcagtttctcatctgtcaaatggggatgaagcccagcctgagttccatgcctcttctagactcagccgtcatccccacagggcctggggggctacatagagatctggggagggtggcatgtggacccagccccctctcagggccagtgttgtgtgttatttcggcatttctgctgcctagggtgagtc

SEQ ID NO: 94488 - DNA, 87716 bp, Homo sapiens
  misc_feature (1)...(87716): n = A,T,C or G
tttggatgtgaataactcacatctgaaacacacttagtagctatatgaacttgtacaagtgactcaacttctctgagctccacatctcactgtgggtggaggtaatggtatcctcctcctgggggtattttaagtgagacagtgcacgctgagttgaggtcctgctccacacactgaggcatggtcaagtccaaaaacaagtaaatgaaaaagacaaaaatccttgactttgtggaattggcagtcagtaaataagaaatataaattaaatatatgttagttagatggtgagaaataataaggagaaaagccaatgggggtggggaacatgagagaaggcttccagttttgaaatggggtagccaaggaaggccttgattaggtgccttttgagatgagggacagagccacgaagacagctggggaaggaagcagttcaggcagtgagaagaacaaggctctaaggtgtgaatgtgcctgtttcaagaacagcaggaagctaatggggctggatggtgagaagtaatcaaagatgaggttagagagggaagggccttggctggggggcagtggctcatgcctgtaatcccagcactttgggaggccgaggcaggtaggttaggagatcgagaccatcctggctaacacggtgaaaccctatctctactaaaaatacaaaaaaatagcccggcgtggtggcacgcacctgtagtcccagctactcaggaggctgaggcaggagaatcgcttgaacccgggaggcggaggttgcagtgagccgagattgcaccactgcactccagcctgggccacagagcaagactgcgtctcaacaaaaaaaaaaagagagagagagaaagagattgagagggaaaggccttgtgcagagccttgcaggccctgtagaaaagttagctttactctgagtgagtggagaagcgattggagacttttgagcagaggagtgaggtggtctaacttgtatttcaactgactcactttggctgctgtgtagagatatggacaaggagagcaaggacagcagcaggaagacaagttaggagatgcaagagatgacataggcttggactaggatattggcaatagggatgagaagagatgagaagtgctcagattctggatatacattttttttttttttttttttttgagacggagtctcgctctgtcgcccaggctggactgcggactgcagtggcgcaatctcggctcactgcaagctccgcttcccgggttcacgccattctcctgcctcagcctcccgagtagctgggaccacaggcgcccgccaccgcgcccggctaattttttgtatttttagtagagacggggtttcaccttgttagccaggatggtctcgatctcctgacctcatgatccacccgcctcggcctcccaaagtgctgggattacaggcgtgagccaccgcgcccggcctggatatacatattttgaaggtagagtccacaggatttaagacagtttggatgtggagtatgagaaaaagagaggartcagcaatatcttcaaggatttgggcctaaacaatggaaagaatagaactgcaaaactcaattctatcaggaaggaagagaaggttaagggagaagatcaggtcagttctggacatgttaagtttgtggtacttgtacttggaagtacaagtctggagttccgggaagtgtatgatcttgagagtcatcagcacaaaggtggtcttcatagatggtatctgaatctggtagggagccaggagactggatgagatcacctagggagacagaaaactagaagaggcccagggaataaccatggacactacaatggtaagaggttggagagatgaagagtaaccaacagggaggcagagagggaggggcctggggcaacggggggctccatatctcccgaaccatatatttacaaataatctccaagagtggattactcttgcttatttctttttttttttttttttctcactctggtctcaccttgtcaccctggctggattgcagtggcatgattatggctcgttgcagcctcaacctcctgggctcaagtgatcctcccacgtcagcctcccaagtagctggggcaacaggtgtgcatcaccacggcctgctaatttttgtattttttcatagggatggggtttccctatgttgcccaggctgatcttgaactcctgggatcaagtgattctcccaccttggcctcccaaagtgctgggagtacaggcatgagccaccgctgcacctggcactcttgcttatctctatggctacagtggcctattgccttctttgtgtttggacacattatcagggccaacctcggagttcaccttttaaggtcacaagtccctatgactgaagtgtgaatgactgacaggtttatccttctcagggggtatacaatgaaagaaaatccctttaataaaatgaatctctatttgatgaaatactgtaggaaaaagggtcatttcccagagggaactatctgtatccctggcatgctgcagttcactgtagtgatgatggtaccaccctggtcagtatcaacccttgggaagccattgggaaggagaaacaagctcttgggggagcatcaatactgctttgggctgtaaggtcttagaggccaggaaaagtatctgggacccaagcatagctcataatgcctgagcaggtgcacactgccttaccttaagcaggataaagcaagaagtgggcaggcagcttcctgacactgtctttaaactcagcttctgcccaccacacttctggttcccttccacctaaccacytctctgtctccgttgcaatttctcctttttctcawgctccagcctagtgccccagcctccctttccacaaatggtgttagattgtcaacattgcagaaatggtgagttcagttctttccaccaaggtcttcgcggttccatgagaaacctgttgtctcttcctattttcctttcactactcaccagcaccaaatccccagtcagcaaaccagagagtacaaaagcagggacttttacactagggttcctcttccccatacccacagttgcctcctcaactaaggaaggtgatgggaaaatgacaatgacaccaataggacaatgggacaaaagcatggacaggaaactcacaaaagcatggacaggaaacacgaatagccattaaasagttaaaaagaatgttgacacttaacaacaaatgtgcagtttaaaggagcaataagagaccatttcatctatcaaagtggcgaggattctaatgtggagggttggcgagagtaaggacacaggcagacactactaactggagtagaaaggcctcactgctttctggagaatggcttggcaacacatagagaccaagagctttaaaacaagtctatgtcttcaccctttcactcaggggtttcacttctagaatttagcctaaggcaataattagccatgcaaatatgtaagttcaaggatatttaccgaaggtctgggcgcggtggctcacacctataatcctagcactttgggaggccgaaagaggtggtcagattacctgaggtcaggagttcgagaccagcctggataacatgatgaaaccccgtctctactaaaaatacaaaaatcagccaggcatgtgcctgtaatcccagctactcaggaggctgaggcaggagtagcttgaacccaggaagcagaggttgccgtgaaccgagatcacaccactgcactccatcctggacaacagagtgagactccatctcaaaaaaaaaaaaaaaagaagaagaaaaagaaaaaaaagaatatttaccacagctcagtttattatatgtttaaaaattgaaggccaggtgtggtggtacacacctgtaatcccagagctttgggaggccgaggaaggaggttgccgtgagcccaggaattcaaggttatagtgagctatgtgcgtgccactgcactccagcctgagtgacagagcaagaccctgtctctaaaaaaacagaaagcaaattgagacccacctaaacatgctataataggaaattggtttaaatgaactagtagaatactgggtgaccattataaatgatgctggctcacgggcttccaaatgtgatacactggtactcgtgcccaaaaatgcataaacaccagacatactcaaatttaggaacagtctacaaaacaactgtcctgtatgcttaaaaatgccagtatcggccaggtgcggtggctcacgcctgtaatcccagcactttgggaggccaagatgggtggattgcctaagctcaggagtttgagaccagcctgggcaccatggtgaaaccctgtctctactaaaatacaaaaagtcagccaggcgtggtggtgggcgcctgtaatcccagctactcaggaggctgaggcacgagaattgcttgaacccaggcggtggaggttgcagtgagccaaggtcgtgccactgcaatccagcctggactgtctcaaaaaaaaaaaaaaaagtcaatataatgaaaggcaaagtacatttaaggtactgtactcatattaaaggaaactaaaaagactcgacagctaaatgcaatgcaggatgccaaatgagatcctagaccaaaggaaaaaattgtcatgaaggacattatggggcaattggcaggacctgaatttggactgtcaattagatcatagtattacatcggtctaagtttcctgatttggataattgtactatattatgtaaaagaatgttttgttcttagaaaatttgcactgatggatttaagggtaaagggtatcttgtatgcaacttactctcaaatggttcagaaaaaaatacaaatgtgtatttatagagaaataatgataaagtaaatgtggtcaaatgatattagtggatgaatctgagtgaagggtatcctggaattctttttagtatttttgcccctttcccatgagattaaaagtattttaaaataaaaagctaaaaaaaggaagaaagtggtgctggtgaagtatattccccggtaggggaaggctctcaggtgcaccagcagcagccatgagtgcctcaacaccagggagagcacagctgccactgacaccttctgccaccctggactctcagttccctgtgctactaaaggaactcagtgtgtggttgaccccaaagttgtcctgggttgactcaagaaggtaggatgagcattctgaggcaaagaattctcttttgtgattttattgactccaattttgcattctgactggcattccctgcatcccaaggaccttgacagcggagggaggcagagatggaggaagtgaaaactacccaaattcagtgtttgttacagacaattcagactgcaaaatttagggtagactatgttcatttatcactgataatgacagtcttaacattcccctacaacaggaagaccaagatttccccaaaaccggccagcatcttgcccattcgccagaaggagaaaaataagtcctggcaagagccaagataaggcccagaagcccctgggttcctttagccaaggtgagtggtttcaaattatgacaagttgcaggttctctgagaagcatctgtaataacctggcaaattaagcatcctctcctgggaggaggaatacagaactctgtaaccacccaatacctgtttccaggtcctgcccctcctggggcacasggcagccaccttgcaattctcatccctagaaaggagagaccagatcaacaaacagcagggctgggactgcccagggggttccgagattccttctcccctcctatcacctgccctccaggcacaccgtcctacttccccctacttccccaggggttgtcagggacagaaggcccctccttcatcccccctagtgttcctccactcttcctccgccccccattactagggtgtccaggacattgtgtgactcaggaaacagctcagacgtgaggcttgcagcaggcygaggaggaagaagaggggcagtgggagcagaggaggtggctcctgccccagtgagagctctgagggtccctgcctgaagagggacagggacyggggcttggagaaggggctgtggaatgcagcccccttcactgctgctgctgctgctgctgctgctgctgctatgtgtctcagtggtcagacccagaggtgaggcatggcrtgggtgaggtgargggacccagctcccttaggaggatgwtcagtggggtgggggaagagggccaagccccaggccrtgtgagggatgctggatggaggagattctcactgcccaaatagagacggcctccagggaaagacggctctgcccatggagctgcttygggcctggtgcyaggggtggtgactgctgggggatgggtgagagggtgcccacctccaggaagaacctcgtcagcactggcactggaggactcttgcagccatagggaagaggggaaragggaacacactgaccacctgcttggggaggagatgagagggaagcaggagatggggacatgaaaggtcaggcctactaagccctttcttagtccagctgtccccaccccccggatggctcaatgctcggcctttccgggaggaaatctcttcgaagtctcagccattcacctcccgggagccacctccgcccctcttctgacccctgttgtcttgcttcygagagatggagtccgaggctggacttgggaggccagagaataaacaggaaaggggggtagggattagtaactgggayggagggcactggggctggggctgggtaccatgtggagagtggggacagatgtgaagaagaggtggtttagartacctgtgggagctgctgtgggcaggtctctcaggagcacctagaagaggaaaggtggaggcacagcacccagggcttccattgcgcctgcctctccwccctcagggctgctgtgtgggagtttcccagaaccctgtgccaatggaggcacctgcctgagcctgtctctgggacaagggacctgccagtgagtgtgccttgcaggagtgggagactggagagaaagggggagggagagcagggggggagaggtgaggaagtgagaccaaagaagaaagagaggaagtgaaggagatgaagggaaacaaatgaaggcagaggagggagtgggcaagaataggaagagggrccagtgatgtgagttttcctctcctcccctgcccaggtgtgcccctggcttcctgggtgagacgtgccagwttcctgacccctgccagaacgcccagctctgccaaaatggaggcagctgccaagccctgcttccygctcccctagggctccccagctctccctctccattgacacccagcttcttgtgcacttgcctccctggcttcactggygagagatgccaggccnagcttgaagacccttgtcctccctccttctgttccaaaaggggccgctgccacatccaggcctcgggccgcccacagtgctcctgcatgcctggatggacaggtaagcgctgctgggggcagccaggaggggacaggcaggagcaatgggctaggctgtgggtggggaagatrgaactggagcctgagaaactgcaagccctttgaagacagaagccatgagaatcaacatgccaattcttggcaatccacttacccacaaccaacattcaccagcatggttgtactgattgctaaaatgttaaaatatttccaaattaagggtgccatgagccccctttgtgcaccatcctgatgcctgtyctagcccctttaatctccccattgcctagcagctagaagagggtcattgctctgcataccaggggtcctccagacttttgcattctgagcatctgaatggctcccaytctgagtggagggagccattatatcacctgggaagactgcagtggtgggaggggcaccgggaagggaaggatgtgacccmgagagtggattgggggccgccccaggaggaggggtgtaaccctggggcaagcttagtgcttcattctaggggctctgcaccagcccctggatccaaatgctagctctgccactgatcagctacatgacctcatataagatattttagctttctggtgttcagttgtcagctgacaaacagggagagtaatggtcacacttcataaggttgctgagaggacagaaggggccgatgctcaggagatgcttgctcagctcagcacctggcacctccactgctgccgccattaccactggtgcacatggactgtgaagtgagtctccaggtgcctaaacccacttaaagattaggaaatgaggwtcagaaaggcaaagtggctcacccaagggtatacaaccagttgtggcacagcatggtgccacctgagtctcctgcctgcagacgtggggtgcttttcacctcccccaagatcacccacgtcccagattttctcaggcaaggccaatttgcaatactctcatcatcactttagaagatatggtcactccagataaaccctcccaagccatgacatcgctcagagcaggggtgatggaacagagcaaagaaagtatggtaataaagggaaggaaatatgaaaatgagacccagagataatccagagtgagcactgggtaacctcagatgggctagaattcgtacaatgctagaaacggctccctctgtcctctgcctcaggtgagcagtgccagcttcgggacttctgttcagccaacccatgtgttaatggaggggtgtgtctggccacrtacccccagatccagtgccactgcccaccgggcttygagggccatgcctgtgaacgtgatgtcaacgagtgcttccaggacccaggacyctgccccaaaggcacctcctgccataacaccctrggctccttccagtgcctctgccctgtggggcaggagggtccacgttgtgagctgcgggcaggaccctgccctcctaggggctgttcgaatgggggcacctgccagctgatgccagagaaagactccacctttcacctctgcctctgtcccccaggtgtgtcctcacaggggctctccggccrcccctctctctgggcagggcaggatgtctccgttggagcctcctcccayagctgatccatgaccctgtcaggtttcataggcccrgrctgtgaggtgaatccagacaactgtgtcagccaccartgtcagaatgggggcacttgccaggatgggctggacacctacacctgcctctgcccagaaacctggacaggtgagttgtttaagccacatccatgacacccatggcccagagagttggcccctggcctcccctactcatagggctcccagccttagccctcgtcccctccccaaccccctgcaggctgggactgctccgaagatgtggatgagtgtgagrcccagggtccccctcactgcagaaacgggggcacctgccagaactctgctggtagctttcactgcgtgtgtgtgagtggctggggsggcacaagctgtgaggagaacctggatgactgtattgctgccacctgtgccccgggatccacctgcattgaccgggtgggctctttctcctgcctctgcccacctggacgcacaggtatgggggtagagggtatcaggaggtgggaggtagagaaggagggtgagagaagcaccaggaggactgctaggagcttcaartggcctttgagagcctcaccccctcttacccctccaggactcctgtgccacttggaagacatgtgtctgagccagccgtgccatggggatgcccaatgcagcaccaaccccctcacaggctccacactctgcctgtgtcagcctggctattcggggcccacctgccaccaggacctggacgagtgtctgatgggtgaggccactcccacttcagagcctctctgagcctcagacaggcstctgcactgaagacagaaaagggcagattgcttttccaattaaaaaaccaaacatctttttccttgaatttgcccasatttggcatctcttgcctacatgaccctctctccaatgttcagcccctcagtccccatgarwttggtcccttatttcctttccatcttaaagacacaagccccttccccaatttggtctcgtctgccacacgcaggcccccacacmttccctgacagtctcacctccttgcccttccygccctgacccctgtggactcccagctcttctctcctcccagcccagcaaggcccaagtccctgtgaacatggcggttcctgcctcaacactcctggctccttcaactgcctctgtccacctggctacacaggctcccgttgtgaggctgatcacaatgagtgcctctcccagccctgccacccaggaagcacctgtctggacctacttgccaccttccactgcctctgcccgccaggtatcagctggatggggccttgggtggggaaaacagggaactagtcctgaacccactaggaatgccccctccagagtaaggacagcttcaggccaattggcgtaagttaccacagatgcttctctctctacccccagacgaaaactcagggacacccaagacccctrggagaggggttaccacagatggtagtgaggttatgcattcctcaacttggggggaagctgccattcatttcatagtcatcatagaggctgcacaacctggtccactgtacacagcagcccagcaagagagggtagaagagcagttcataaactttctgtgctgcagcctttgctcaggycaacccagaatgctccctctgattatagaaactctcccatgtagagattcaaggtaatcccttaaaatcccaaaagccctgtgatacaacaggaaaatttggtacaacaagaaaaaaattgctgcaagacagcacccacctccaggctagytttaagggggaaaagtcgccccagggagacagcaacagagccaacatcaaggagttgaatgaaatcagaaaaataatcgccaactttatgccaggtactgtctgagcatcttacaggcattgtctcatctacttattacaataacyctatgaggtcagcactgcccattttataactgaagaaactgaggcacagagagtttaagtgacttgtccaaggtcacccagctagcaagtggcagagctgagattcaaaccaagggcttcaacaattataaccactaccccatattgactttctaaactgagcggcacccaaagatactggctcaggtcacccaacagacaatcatagagaaataagagaaaacggttcggtaacccaagggacaacattgtagatatcaaggagcttcagaagcagactcctcaggcaagaaaagaaaggaagccaaggtccagaggttgatcccacctcaattcaggatgaaacagtggagaccaggatgaacccaaagcaacggracaaatataggagcaacaagcttcccagatgcacttcaaattcctccactttgggatctctgttctccctagcatggaggcccrcccagggagaacaagaagygggactcattctccaagccartttgttcctatttgtaccttgaggtcctccrggctgatcagcctgccctggtgagccccgccctctgtatacacagkaatggccaccagaaagccttgtagtcctcccgcaggtccccagcaagcaccctgttccctggcctttcacacctcaaggagcagggccacacactgygaagcagcagggcctcagggttcatcttattcaaccccatgcagacagcacctcgggggaggaccgcctgagtggggcaagtcaggagcagggccgattctagaacacaggtctcccaggcagacctggctgagccacagccctcatggtccccatgtccccaggcttagaagggcagctctgtgaggtggagaccaacgagtgtgcctcagctccctgcctgaaccacgcrgattgccatgacctgctcaacrgcttccagtgcatctgyctgcctggtgagtacagatgcctctctggccaccctcagaccccaggcctctgaacctgcagagttcaggctcagcaatcacccaaggccacttgaagctctctctagccaagccaaggagtcctccaaatctgtctttgctccccaaaatctctactcttacatccccaaatyttcccttgcttacttgcccattctcatctctgtcctaccaaatcacccaaagatccctcctttccagtcctcctgcacagcctctgtgtatgcatgttgaggtcccaggctggtcttggcactctcatcataaacccagcaaaagctgccccaagcctttcttctccagcctcaccggacactcctctgtcccctgctattataataactacacttattcaccacttactccaggctagccatttggctgagtacttttcaggcgttatgtcatttaatctttttaacagtaccatgaggtaggttccattattattccccttttacacagaacaggaaactggggcctagagggttgaccagcttgcccaaagtcacacagctggcaggtggctgagcttcaccttttctgcatcatctcctgtcaccccacgctcacctgccccaggtgtcttctctgggaagctctgcaagttcacctttcctggcaagggaaggcgccatgctgtgcctccctcgatgaccttggcctcctctccccacccacttccgccccaccaggattctccggcacccgatgtgaggaggatatcgatgagtgcagaagctctccctgtgccaatggtgggcagtgccaggaccagcctggagccttccactgcaagtgtctcccaggtaaactggggcacacactgtgggggacagcgggarcaggaggcagacatccgtgcaggtccctgaccttcctgctgtgccacaggctttgaagggccacgctgtcaaacagaggtggatgagtgcctgagtgacccatgtcccsttggagccagctgccttgatcttccaggagccttcttttgcctctgcccctctggtttcacaggttcacaggggaggcaytggaaagaactggcagaatattttattccatttgggttggggcagagttcattggtgggtgtttgatggttgggatgtgagaatagaatgagaatggtatcctttaaagttatttagtgtaaaacctgcayaattgtacaaccatggggacaagggcaggggttaccgtagggcccacatgggcccagtgtaaatggtgtgattgcggcttgggagcagaggacggggctcaaagaaaaggcattcacttgcttatttagcaagcacttaccaactgcctactatgccagatacggaggcaaatctgagtaagacagttgccatcttcatgtgactttaagtctaatacagagagaccarcaagtctcctgttgatcatagcccacagaggtgctctgagagaaaaacgtgcaggatattacaagagcacagaggaccagccaacccagactaaaaatggaggaggtgatggctgagatgagtyttgaaagataagcagaggctgggcgtggtggctcacgcctatagtcccagcacttcgggaagccgaggcgggtggatcaccygagattaggagttcgagatcagcctggccaacatggtgaaacctygtctctattaaaaatacaaaaattacaatttgggaggccgaggcgggtggatcatgaggtcaggagatcracactatcctggctaacacggtgaaaccccatctcaactaaaaatacaaaaaaataactgggcgtggtggcgggcgcctatagtcccagctactccagaggctgaggcaggagaatggcgtgaacccgggaggcggagcttgcagtgagctgagatcacgccactgcactccagcctgggtggcagagtaagactccacctcaaaaaaawamaaaaatacaaaaattagccaggcgtggtggcgggcgcctgcaatcccagctattggggaggctgaggcaagagaatcgcttgaacctgggaagcagtggttgcagtgagcygagatcactccactgcactccagcctgggtgacagagcaagattccatctcaaaaaaaaaagaaggaaggaaggaaggaaagaaggaaggaaggagagragrgaaggaaaggaaggaaaggaggaaatgaggaaagagagaaagatagaaagatggatggtcaggagtctgtctaaatagagtgccagatagtgtgttttagctggagataactgcatgtgcaaagacacagatggaagaaaagcccaccccatttaaggaactgtaagaaagtcagagttaagggtacagcaaggcaaagatgagaaacacagctgttgtacaaatgtcatgtcctgcaggactctgcatatcattctgagaaagttaaacaatatcttaaaggcaatagggacccattgaaggacaggttcatgggttcatagggagtgagtaaggcaagcataagaagtggctttggcccaatgaaggatgtggctttggcccaatgaaggatgtggaggagctgttttctttttgacccatyttcccaccccaggccarctctgtgaggttcccctgtgtgctcccaacctgtgccagcccaagcagatatgtaaggaccagaaagacaaggccaactgcctctgtcctgatggaagccctggctgtgccccacctgaggacaactgcacctgccaccacgggcactgccagaggtaacatcttccagaccctccccatctgccccctcctttgggctcccttcgctaggacaggagaagacagccagtgagatgtaggtctgtgagaaatgaccaatggggaaaaggaaggagatggcaargttcttagggcaaggcagtgggagggctcaactggtaagtgttatccaaggagaagagagtccacaaaaactggtggaaacagaggaccagggggtcagagcagaaagaagagcaytaaatcccagggcgaattaatcattcattagaaaaatatctgctgaggccaggcgcagtgctgattacggtctcatgccggtaatcccagcactttgggaggccgaggtgggcggatcacctgagatcagcagttcaacatcagcctggccaacatggtgaaaccctgtagctactaaaaatgcaaaaattagctgggcatggtggcgcacctgtaatcccagctacttgggaggctgaagcggaaggatcacttgaacccaagaggcggaggttgcagtcagccaagatcatgccactgcactccagcctgggtgacagagcaagactccgtctcaaaaaaaaaaaaatctgctgagcacctactttgtgtggctactgttccaggccctgggggaaacacaaagcaaaagagataaagcaactgctctcgtagagctttcattctaaagaaagacagaaaataagtawgttacagaaagaatatatatgtgtgtgtatatatatatatatatatctccaactagatatatagatgcatatatctagttggagaaaatgagcaggtgttggggaggatgggggcggtgctgagagcaaagtcactgaagaaagaggccagaatctcagggccaaaagaagaggaagtcataggggtccaggcagcagggaggggaacataagcagtaggagaagagaaaaaccctcccctttctctttacaaccagatcctcatgtgtgtgtgacgtgggttggacggggccagagtgtgaggcagagctagggggctgcatctctgcaccctgtgcccatggggggacctgctacccccagccctctggctacaactgcacctgccctacaggctacacaggtgagaccctccctaaaccatatacaccctgtgctggtcaccccctatgtcaagggtaaggcaggcgaccacgggccctgagtctcagtcaccactaaggagaactggactgcaggggacacgggtgatgtgtgggaggtggtgagaacggaggttgatgggaaagaataatagggttggggatgaggaagggaaggaagaggaaagagaaggagagcggagggagggaaggaggacaccctttctcagcccccacctgtttccttcaggacccacctgtagtgaggagatgacagcttgtcactcagggccatgtctcaatggcggctcctgcaaccctagccctggaggctactactgcacctgccckccaagccacacagggccccagtgccaaaccagcactgactactgtgtgtctggtgagtgcccactgtgtcatggggctggggtccacaggagaatggaagaactaaggagggtatgcttgtgtcatattttttaaaatttaattgaacagaccagcctgggaaacataatgaaactccatctctaaattagctgggcacacagtggctaaggcctgtagtctcaaatacttgggaggctaaggtgggaggatgacttgagcccagaaggttaagactgcagtgagctctgatggcaccactgcctgggtaacagagcaagaccctatctaaaaayaataaaatatcatataaataaaaattaattggatggcagtgagctgtcgttttgatgggggtggggggtgtatgtcctatgtacagtgtgactgaggtcacaggccaggttacaggcaaggaacccaaaccctcacagcctcctctctccagccccgtgcttcaatgggggtacctgtgtgaacaggcctggcaccttctcctgcctctgtgccatgggcttccagggcccgcgctgtgagggaaagctccgccccakctgtgcagacaggtgagcagggcccaaagacccctagaagggagaaaacccctcakccttcccacccctcctctcatctccccctgggttccaggctgcctcccaccccacacctcgttccgccttccctcctggcttgccacctccctgtggttgcctcccgacaatatcacacactaccttccccttgttgcccgaacttcttcctatcatgccctgtctctgtcttgttcagcccctgtaggaatagggcaacctgccaggacagccctcagggtccccgctgcctctgccccactgkctacaccggaggcagctgccaggtgagggccattgaagtcaggcgtgctgrggagggaagtggctgggagggaaaccagggagggtcacctggtcccaggccattcaggagaaggttttygaagtaagggatttcgaggagctggagtgggcagaggaccatctctgggctgagaatctgatgctatgtccwgcctcacgctccctcccacccctcagactytgatggacttatgtgcccagargccctgcccacgcaattcccactgcctccagactgggccctccttccactgcttgtgcctccagggatggaccgggcctctctgcaaccttccactgtcctcctgccagaaggctgcactgagccaaggtaaccaacrccggcactgactggagagcaaatgaagaaaatatgggtgttctcacctgccccgttcctgtgggcttccacacagcttttggccaaaacaaccayctgagaatcaaaaccacacagacaamtcagttcttgattgcagaggtgttgaattgtgcaatcagagaagcctaacacaattcctgttacctcatttaacgcaattcaagcaacaccaaccagcccattccacaggattccagtttaacccaaccatgagggacatgactcaacgtggagcaactcaactctgtcctgatcatcataacccaggcagagtggaccacacttaatccagctacactcaacrcatttcaccccaccccwctcacttcgatgtcacgccaccctctttgtaaaagaacactaaaataaggtttgatatgagaagagctcgggaaagagattatgatggagttaagggatagctgatgggaatcacagggagagaacattaaaggaatgcagaactcaggggacagacttaagccacttgtcctcacttgaggcataccttgaattatttcttgctcaagccttgctttaagccaagaaaacagttgctttaacattatgataagctttaggggtatgtctccaatattctggcagaaagggtgaggagagaggtaaaactcgatggtctaatttcttcagtgccaggagttattaactccttgggcccagaccagtctccacccaggaatgttastggtccccaaggtaaaggcctctacacccagagattgggccctgaatacacccttyctcctmctcacataccttatttatttatttatttatttatttatttatttatttatttttgagatggagtcccagtctgtcacccagggtggagtgcagtggcacgatctyggctcactgcaaccttcacctcctaggttcaagtgattctcctgcctcagcttcccaagtagctgggattcgtgtgccaccatgcccagctaatttttttttttttgtatttttagtagagatggggtttcattatgttggccagactggtctcgaactcctaacctcagtgatccacccgtctcagcctcccaaagtgctggaattacaggtgtgagccaccacgcccggccacatccccatttaccgtttctgtttgtttgtttgtttgtttgtttgtttkagatggagtcttgccctatagcccaggctggagtgcaatggcacgattttggctcactacaacctgcgctgcccaggttcaagtgattctcctgcctcagcctcccaagtagctgggattacaggtgcctgccacaacgcccgaccaattttttgtatttttagtagagacggggtttccccatgtttgccaggctggtctcacactcctaacctggtgatccacctgcctcggcctcccaaagtgctgggattacaggcgtragccatggcgcccggccccccacttatctttgtatatccctgtttgtctctctccccaggcatagacgtctcttccctttgccacaatggaggcctctgtgtcgacagcggcccctcctatttctgccactgcccccctggattccaaggcagcctgtgccaggatcacgtgaacccatgtgagtccaggccttgccagaacrgggccacctgcatggcccagcccagtgggtatctctgccaggtgagagggtctgcaggagaagggggaggaaagacaagggtgggctggatgggagagacagtagtgactgagggaagacccaatgtatccatttcacctccttttattttttttaaccccacacacccaactaaccacaaagtcatgccacyttatctcctgaagttttctcaagtctgtgctttcaccttcaccctttgtcccactgcctgagtcctgacctttgttgcgttccagatagatacttgcatcagcctcctaactacagtctctgcctccacacttgtccttctataggttcagcctttaccccgtggccagggtactctactgaaaatgtccagttgacctgtctctcccctgctgaaccttcggaggctgcccgcctcattctgaataaagtccaaggcctgcatgacccagccctgcctgcctctcaggcctcagctctccccatcccacccttctactctctgctccagcaacatgaaactgctgctgactttgccacgtaccccatactgattcttgcctctcagcctttatccctgctattgacactacctggaatggccttcccaacccctcttccacaggctggtgttcaggaggcatcttcttcaggaagrtgtccctaacttctccccasgctggattagggcctcttctttgtggtccaggtcactaagccaggagaggcaaagctggcattcaagtctaagcagcctgattcatatgctcagaaccacaacttttttgtgtgtgtggttgccattttattttcttttgttattgacaaacggtagtcatacgtatctatggggtacatgtgagttttttggtttctttttttttttctctctcgtttttggagacagagtcrctctatcccccaggctgaagkgcagtggcatratcttggctcactgaaacccccgcctcccaggttcaagcagttctcatgtctcagcctcccgagtagctgggattacaggaacgcgccaccacgcctggctaatttttgtatttttagtagagatggggtttcaccatgttgggcaggctggtctcagaactcctgacctaaagtgatccacccrctcagcctgccaaagtgataagattacaggtatgagccaccgcacctggacacatgtgatattttgatacatgcatacaatgtatcatgatcaaatcagggtaattgggatatctatcatctcaaacatcatttctttgtgttgagaacatttcaaatcttctctyctagttattttgaaatacaaattgttaactatcaccatccttctctgctatctaacactagaacttattccttctatatgaccataattttgtatccattaaccaacctctcttcatctccccctccctgccaccctttctaacctctggtaaccatcattctaccctacttccatgagactaacttttttagctcccacatatgagtgaggagcaatattacacatgcaataggaggctgatgcaagtatctacctggaatgcaagaaaggtcaggactaactaaggcagtggcacaaaggtgaaggtgagagacatgcaatatttgtctttccgtgcctggcttatttcacttaacataatgtccttcagtttcatccatgttgctgaaaatgataggatttcattctttttctggctgaataatattccattgtgtctatatgacacagtttcttttttccattcatttgttgatggmacttcagttaattccatatgttagctattgtgaacagtgctgcaataaatatggggatgcagatatctcttcaagatactgatttcctttggatatgtaatgaacagtagattgatcacatggtagatctatttttaatttttgagaaacttccatacttttctccatactggctgtgttagtttacattcccaccaacagtgtatgagggttcccctttctctgcatccttgccagcatctgctattttttgcattttttttccttttytgagacagagtcttgctgtgttgcccaggctggatcacagtgacttgatctcagctcactgcaacctctgcctcccagattcaagcgattcttgtacttcagcctcccaagtaactgggatcacaggcgtggaccaccatgcttggctaattttttgtatttttagtagagatggggtttcaccatgttggccaggatggtctcgaactcctgacctcaaatgatcttcccgcctcaacctctgaaagtgctgggattacaggcatgggccaccacacttggcccttgtgttttcaataayagscactttaactggtgtgagatgatatctcattgtggttttgatttacatttccctgatttgcatccatatacctgttggccatttgtatgtcttcttttgagaaatgtctgttcagataatttgctcattttttaaaccacattatttgtcggtggtggtagtggtggtgtttgctgttgagttccttatacgttctgattattaatcccttgtcagacagtttgcaaatattttcttctattctgtaggttgcctcttcactccattaattgtttcctttgctgcacagacactttttagcttgatgtaatcacatttgtctgttgttgcctttgttgcctggctgttgaggtcttacccaaaaaacttttgcccagaccaatgtcttgaagcatttcccaaatgatttttttttttttttttttgagaaggagtcttgcaccgtcgcctgggctggagtgcagtggcgcaaatttgactcactgcaacctttgcctcctgggttcaagcgattctcctgccttagcctcccaaatagctggaatttacaggtgcccaccaccacgcccagctatttttttgtatttttagtagagacggggtttcaccatgttggccaggctggtctcaaactcctgaccttgtgtttgaggattacaggtgtgacccaccgtgcccggctgaattttttttttagtggcttcaagtttccagctgtacatgtaaggctttaatctattttgtatatgatgacagatagagatttagtttctttttttctttttttttgkggggggggatagagtcttgctctgttgccctgttgcccagtctggagtgcagtggtatgatctcagctcactgcaacctccacctcccaagttcaactgattctcctgcctcagcctcctgagtagctggaactacaggtgcacaccactacgcccggctaatttttgtaattttagtagagatggggtttcaccatattggtcaggctggtttcaaactcctgacctcaggtgatccacccacctccgcctcccaaagtgctgggattacaggcgtgagccaccccgcccggcctaggtttagtttcttctgcatatggatatccagttttcccagcacaatttattgaagagagtgtcctttccccagtgtgtgtacttggtgcctttgttgaaagtaagttggctggccgggagtggtggctcatgcctgtaatcccagcattttgggagaccraggcgggcagatcacaaggtcaggagttcgagaccagcctgaccaacatagtgaaacccccgtctctactaaaaatacaaaaattagccaggcatggtggtgcgcacctgtaatcccagctactcaggaggctgaggcaggagaatcgcttgaacccaggaggtggaggttgcagtgagccagatcgtgccattgcactccagcctggcaacagagcaagactccatctcaaaaaaaaaaaaaggaaagaaaagaaaaaagaaagtaagttggctgttaaatgtttggacttgtttttctgggctctctattacattccattggtctatgtgtctgttttttatgccagcaccatgctgttttggttactatagctttatagtatatttttaagttaggtagtgtggtacctctagctttgttctttttgctcaggactgctttggctatttgggtcttttacagttcagataaattttagggttgttttttctatttctgtaaagaatattattggtattttcataggggttgcatgactctgtagatcactttggtaagcacagacattttagcagtattcattcttccaatccatgaacacaggatatctttccatttttttgtgtcctcttcaatttatttcatcaatgttttatagctgtcattgcagtactctttcacttctttggttaaatttattcatttgtttttattttttgtaactattataaatgggattgctttcttgatttctttttctgattgtttgctgttagcgtatagaaatgctactactttttctacattgattttgtatcctacagctttactgaatttgtttataaccagtgttttctttaggtttttctaaatataggattatgtcatctgtgaacatggataatytgagttcttcttttgcaatttggatgccctttatttctttctcctgcctaattgctctggccaggacttccagtattaccttgaataaaaatagtgaaagtgagcatccttgtcttgttccagatcttagaggaaaggctttcaacttttccccattcaatatgatgttagctgtgggtttgtcatatatggcttttattattttgagatatagaaccacagctttttttttttgagacagagtcttkctctgtcactcaggctggaatgtagtggtgcaatctcagctcactgcaacctctacctcccgggctcaagcaattcacctgcctcagcctccccagtagctgggattacaggtgcctgccaccacacctagctaattttgtgtatgtgtgtatttttagtagagatggggtttcaccatgttggccaggctggtctcaaaatcctgacctcaagtgatccacccgccttgacctcccaaactgctgggattacaggcgtgagccaccgtgcccggccagaaccacaacttttgatagaaggctcaagacagataccctaacctaccctcttttttcacttttttattttattttttaaccttttattatgaacattttcaaacataaacaaaagcagtatactgatcagtagtaaacctctgggcacccattactcagctttacttattcttttttttttttttttttttttttttgagacagcatctcactctgttgccccggctagagtacagtggcgcgatctcggttcactgcaacctccgcctcccgggttcaagcgattctcctgcctcagcctcctgagtagctgggactacagggacatgccaccatgcccggctaatttttgtatttatagtagagatggagtttcaccatattggccaggctggtctcgaactcctgacctcgtgatctgcccacctcagcctaccaaagtgctgggattacaggcgtgagccaccgcacccggctatttacttcttcttttatgaagctccctcctccaaaacacccccatcacctrttccttccagctctctgaccactccttggattctctgtgaattcccttttctctctttgaagcctgccttcctggtactgtactcttgcacactctctttcctcttgcaagaagccagcacgtggtacagatcttgccaatgacccttctctcactagctgagtggcatgaagaagcagaaaatggttaagagcattggtttggagtcacagaccttcattgattcccagctctgccacctatagctatttgacttgcacaagtcactaacctttcagagactcagcttccttacgtgcaaagtaaaaatcgaatgagataacccaaataaaatgtcattagggggatttttaggttatgtatataaatcatgcaataaatgctagtcatttctttcctctggttgactgagagcttccaggaaataggaatgggttctaactttctttgtattcctagtgcctaaaacggtgcctgacacaaagtaggcactcaatagatgcttatgaattaataaagtatgagagagcctggtaggtatttagcaggggaggaaggttttaccaaaaatggtgctgtgtttggtggcagtgtgtcatagagattgtttgggactggggaagtttgagttgtgtgtcgccaacaattgtgtctcatggggagttgagatagaaggattgtgacacatggccatgatggatggtgagttgagtgatgctgttgagctggaaggtgggggactggacagactatcttgagctgggtcccttgtagtgctgggttgggctcatccactggttccctgtctaatcctctttgtctgcagtgtgccccaggctacgatggacagaactgctcaaaggaactcgatgcttgtcagtcccaaccctgtcacaaccatggaacctgtactcccaaacctggaggmttccactgtgcctgccctccaggctttgtggggctacgctgtgagggagacgtggacgagtgtctggaccagccctgccaccccacaggcactgcagcctgccactctctggccaatgccttctactgccagtgtctgcctggacacacaggtgaggccccaagacaaggggcacaagtgtgtctggagcacagccaagcagaccayggagagccagatagtctccacccatgcggcagccgtcacctggtccatcccctgcctccacgcccacccccgcccagaaaagatgccccaggatcccttcacctgcacatctagcactgggccaacatccaggaatgagctaggatggaggcagtgactgatgcagtgtgtgacrtctaatctcccccataattacaggccagtggtgtgaggtggagatagaccyctgccacagccaaccctgctttcatggagggacctgtgaggccacagcaggatcacccctgggtttcatctgccactgccccaaggcaagtgaycacaaatctgccttctctgttgccccctatgctgacaaggcaagaatacctcagttggaatcccagaagggactgtgggtgagcactgatgtggaaattattggaaaaagccatgccaagctcacagtgggaagtgtctctcagaagcagtcaaaggcaaggcaggatcrgttgatagcatgaatggaattttcaaaaatcacaggcgttgcctaagggaaggtcaggagctccccaagctcaagctgcrtggtgggtrgcctcagataggttattttaactctgtgtgtgtttgtatatgtatttatggacctcagatgcatggaattagactaatcttaagctttggttcctgatacactgacattggtttatgcctggtcttcttttattttattattctaacaatgtaacacccatgaacctaacccaagaatttcaatattaataataacttacatcyacttaagtcctcctcctgtatcctgttccctctccagaggaagaggaagacatatgatcctatttctaaggagtaagataataatataacagccggccgggcacagtggctcacgcctgtaatcccagcactttgggaggccgaggcaggcggatcacctgaggtcgggcattcgagaccagcctgacaaacatggagaaaccctgtctctactaaaaatacaaattagctgggcgtggtggtgcatggctgtaatcccagctattgggaaggctgaggcaggagaattgcttgaacccgggaggcagaggttgcaatgagctgagattgcaccattgcactccagcctggacaacaagagcgaaactctgtctcaaaaataataataataataatataatagcattctattaactgtttagtcttctaggacttgcactgtaatgccacagtccatcaggttgttgcacacagctgtgcttcatccattttcaacagaatgtaatatgtcattgtgtgaaattaccacaggacatggtttcaacatccacaaaatgattaacttgatgctctctgaggcgccttttagatatgagaatctaggaccctctgcaccgtcttaacccaagagtttgcttgatrgagagcgggaagaataatgcaagttscatctccaatatctcccctcccctccacagggttttgaaggccccacctgcagccacagggccccttcctgcggcttccatcactgccaccacggaggcctgtgtctgccctcccctaagccaggcttcccaccacgctgtgcctgcctcagtggctatgggggtcctgactgcctgaccccaccagctcctaaaggctgtggccctccctccccatgcctatacaatggcagctgctcagagaccacgggcttggggggcccaggctttcgatgctcctgccctcacagctctccagggccccggtgtcagaaacccggagccaaggggtgtgagggcagaagtggagatggggcctgcgatgctggctgcagtggcccgggaggaaactgggatgraggggactgctctctrggagtcccagacccctggaagsgctgcccctcccactctcggtgctggcttctcttccgggacgggcagtgccacccacagtgtgactctgaagagtgtctgtttgatggctacgactgtgagacccctccagcctgcacgtgagcctgaaatccactggagccagggaaggagaggggtgggtgagaggaggaggaaggacgtagatggctctgagttacagtgtggccacagccttgggctccagggagtttccaccctaataaccatcactaaacaggggtcgaagactctggactccaacctagggtaatggggtggcatcagtatttaatgtggggcgtggcctttgggctcctctctaagagttgwaggaactcaggtctcaagcctccttccctaagccttgctgccatggrgtatttcccctagcagtcagcacctcacagagggaaaagggcctgggactctcctttagaaacagaggagagcttgggagggtacagagaggggacagtctagggagacaggggtgttagcagacattggggtgtctggactaccatccaggacttgactaagctcattgctccacagctgcccccacttagcaaccaaagccctagagggcacaaaatatggggaattctttctagggtgaagaaaagagtcaggttttagggaggtcctgagtccccctctccttaccccacagtccagcctatgaccagtactgccatgatcacttccacaacgggcactgtgagaaaggctgcaacactgcagagtgtggctgggatggaggtgactgcaggcctgaagatggggacccagagtgggggccctcyctggccctgctggtggtactgagccccccagccctagaccagcagctgtttgccctggcccgggtgctgtccctgactctgagggtaggactctgggtaaggaaggatcgtgatggcagggacatggtgtacccctatcctggggcccgggctgaagaaaagctaggaggaactcgggaccccacctatcaggagagagcagcccctcaaacrcagcccctgggcaaggagaccgactccctcagtgctgggtaagaagctaggtggagggaagggccagacaccagtttttttaagagggcagagggaggaaagggagccagggaccaatacagaggtctctgaggtgcctcctctacaggtttgtggtggtmatgggtgtggatttgtcccgctgtggccctgaccacccggcatcccgctgtccctgggaccctgggcttctactccgcttccttgctgcgatggctgcagtgggagccctggagcccctgctgcctggaccactgctggctgtccaccctcatgcagggaccggtaggtgaccccttgccactttctctgacctctgttcccaggccagctctcatgctagcaacaggcaatggaggctgaatcaaacaggacagctgagactgaaaatgttctttgtggggacttactttccctaaccccgctttctctaactgaatctcccactggcccatttgttctacagtctccttccttatttccctaagcacattatcctaacctctgtcatagccctccaacaaagggatggtttatcttctctaccagactgagaatacctaatagtctttgtatcagacaattcatagtacatgaaagaataataggctgggcgcagtggctcatgcctataatcccagcacgttgggagaccaaggcaggtggatcacgaggtcaggagattgagaccatcctggctaatgcggtgaaaccctgtctctactaaaaataaaaaaattagccggctgtggtggcgggtgcttgtagtctcagctactcaggaggctgaggcaggagaatggcgtgaacctgggaggtggagcttgcagtgagccgagatcgcgccactgcactccagcctgggcgacagagggagactccatctcaaaaaaaaaaaaagaaaaataactgctatatcgtactttgtgccttactctaagcattttacattgttacctcatttaatcctcccccacaaccccatgaggcacgtactgctggttgagtatcccttatctgaaatgcttgggaacaaaagtgtttcagatttcggatttattttggaatatttgcattatacttactggttcagcatccctaatacaacatccaaatgctacaatgagcatttcctttgagcgttatgttggtactctaaaagtttcagactttggaacatttcagatttgggattggggttatggatactcagcctttttttgtgtgtttgttttctgagacagtcttactctgtcagccacactggagtacagtgacgccatctcagctcactgcaacctctgcctcctgggtttaagcaattctcttgcttcagactactgagtagctggaattacaatggcatgccaccatgccctgataattttttttgtttttgttttgttttgttttgtttgagacagagtcttgccttgtcgcccaggccggagtgcagtggcgcgatctcggctcactgcaagctccacctcccaagttcacgccattctcctgcctcagcctcccaagtagctgggactacaggtgcccgccaccacacctggctaattttttgtatttttagtagagacagggtttcaccatgttagccaggatggtctcgatctcctgacctcatgatccaccygcctcagcctcccaaagtgctgagattataggagtaagccactacacccagccactaatttttatatttttagtagagagggggttttgccatgttggccaggctggtctcgaactcctggcctcatatgatccacctgcctcagcttcccaaagtgctgggattacaggcatgagccactgtgcccaacctcaatctatattatcatccccattttgcagataaggaaaccgaggcaaagacmggctactaaacttgtccaaaggtctcccaatagtaatcagtctcaccaggagtggcctctctttgtgactctgtctctcccaccagcaccccctgccaaccagcttccctggcctgtgctgtgctccccagtggccggggtgattctcctggccctaggggctcttctcgtcctccarctcatccggcgtcgacgccgagagcatggagctctctggctgccccctggtttcactcgacggcctcggactcagtcagctccccaccgacgccggcccccactaggcgaggacagcattggtctcaagtgagaatgaggagaaacccaggctcaggaaggggagtctctcctatggcgatatttacaatcagaaaagataagaaatactattgcagaagtcaaagataggggaaggagagaggggtgggaagcctgctggaaattttggagaccctgatggtcataattccgtgtaacctctacccacccattcctttccagggcactgaagccaaaggcagaagttgatgaggatggagttgtgatgtgctcaggccctgaggagggagaggaggtgggccaggtgaaagggctggggcaagaatggtctggaggtgatggaagsgatsaaagggcaaatcaaccttcactgatccttgctgttacccaaaggctgaagaaacaggcccaccctccacgtgccagctctggtctctgagtggtggctgtggggcgctccctcaggcagccatgctaactcctccccaggaatctgagatggaagcccctgacctggacacccgtggacctggtatgtgagtcaacccagaccaagaaaaaaaaaaaaagtcctttgaccctattagaatcagagagtcctttaatatcagaactagaggaaataattttagactgagtgccttagaacaatgattctcaaagtgtggtcctcagacagcaaaatcagcatcacctgggaatttgtcagaaatgcaaattattgggctccactacagagctactgactcaggaatttaaaatgttaggcaatctgttttaacaagcccttcaggtgaatctgatccagactcgtttgagaaaaccactgctaggccgggcgyggtggctcackcctgtaatcccagcactttgggaggccaaggcgggyggatcacaaggtcaggagatcgagaccatcctggctaacacagtgaaaccccgtctctactaaaaatacaaaaaattagccgggcgtggtggcgggagcctgtagtcccagctgctctggaggctaaggcaggagaatggcgtgaacctgggaggaggagcttgcagtgagccgagatcgcgccactgcactccagcctgggtgacagggcgagactccgtctcagaaaaaaaaaaaaaaaaaagagaaaaccactgccctggaatgtcagagaattaagctgcaggttccttttacagaggaagaaactgaagtcagagaaaagcagaaaagtcacttggctaaagccacacagagccagaacttagcttcccaacacctcaggttttgattctcyctgagcttacatgttgtcccttcccccttgttgtgtcctttagattgacccattactctgtcttaccaacagatggggtgacacccctgatgtcagcagtttgctgtggggaagtacagtccgggaccttccaaggggcatggttgggatgtcctgagccctgggaacctctgctggatggaggggcctgtccccaggctcacaccgtgggcactggggagacccccctgcacctggctgcccgattctcccggccaaccgctgcccgccgcctccttgaggctggagccaaccccaaccagccagaccgggcagggcgcacaccccttcatgctgctgtggctgctgatgctcgggaggtctgccaggttagcacacactgaggtccctacagggaatggggcgagcttacaagtaaagctggacagaagcatcccctagagtttgacaaggaggaaattggtgtgattgggaacctgacagggaaactgyggaggatggctgaatatggattgcgagtggggttaatagtgtaaggaactcgagttggcagtccaaggtaccccaggkgtcwstggccctctgtctccccagcttctgctccgtagcagacaaactgcagtggacgctcgcacagaggacgggaccacacccttgatgctggctgccaggctggcggtggaagacctggttgaagaactgattgcagcccaagcagacgtgggggccagagataaatggggtatgtagaggaaggggtgatgtatgctatagagaagttgagcagatggggtgggagatagcgtgcaaaatataggtgcagcagaggggcattccctctcatcctgctgttacgrcggtcaatctgagatgcggtggaagtacgggccgcgtgagtttccccccccaactcccaccctcaacaccacactggccctccgctccagcttactggggaactggcatggaacacagtgtctgtggaaaggggggggaatctcgtggggggagactgtctcccggtctcaccgaccccagaacaatgccccattgtccctcccgcgcactggtgacgtcaccagggcaacacttcctgcaggccggtggtctcctgggcaacgcttcccgcctttgagggaccagccggcccgaatagcccttcccccaaggccagaacccgtgggaaaccggaacccaggcgtctggcccccaactggggtaacaacctcccacgtcgtcccctagggaaaactgcgctgcactgggctgctgccgtgaacaacgcccgagccgcccgctcgcttctccaggccggagccgataaagatgcccaggacaacagggttagatgggacagagggcttcccacaaaacagtcaggcgcacgagagatggaaagtgcggtaacccgcaaagcctgaagggataggggccagtggtcgcgcaagtgaaggcagaaaggcccagtcctgtgggcgtggccttccctgatatcggccctggctcttctgtacaggagcagacgccgctattcctggcggcgcgggaaggagcggtggaagtagcccagctactgctggggctgggggcagcccgagagctgcgggaccaggctgggctagcgccggcggacgtcgctcaccarcgtaaccactgggatctgctgacgctgctggaaggggctgggccaccagaggcccgtcacaaagccacgccgggccgcgaggctgggcccttcccgcgcgcacggacggtgtcagtaagcgtgcccccgcatggrggcggggctctgccgcgctgccggacgctgtcagccggagcaggccctcgtgggggcggagcttgtctgcaggctcggacttggtccgtagacttggctgcgcgggggggcggggcctattckcattgccggagcctctcgggagtaggagcaggaggaggcccgacccctcgcggccgtaggttttctgcaggcatgcgcgggcctcggcccaaccctgcgataatgcgaggaagatacggagtggctgccgggcgcggaggcagggtctcaacggatgactggccctgtgattgggtggccctgggagcttgcggttctgcctccaacattccgatcccgcctccttgccttactccgtccccggagcggggatcacctcaacttgaytgtggtcccccagccctccaagaaatgcccataaaccaaggaggagagggtaaaaaatagaagaatacatggtagggaggaattccaaaaatgattacccattaaaaggcaggctggaaggccttcctggttttaagatggatcccccaaaatgaagggttgtgagtttagtttctctcctaaaatgaatgtatgcccaccagagcagacrtcttccacgtggagaagctgcagctctggaaagagggtttaagatgctaggatgaggcaggcccagtcctcctccagaaaataagacaggccacaggagggcagagtggagtggaaatacccctaagttggaaccaagaattgcaggcatatgggatgtaagatgttctttcctatatatggtttccaaagggtgcccctatgatccattgtccccactgcccacaaatggctgacaaatatttattgggcacctactatgtgccaggcactgtgtaggtgctgaaaagtggccaagggccacccccgctgatgactccttgcattccctcccctcacaacaaagaactccactgtggggatgaagcgcttcttctagccactsctatcgctatttaagaaccctaaatctgtcacccataataaagctgatttgaagtgttacctttttttggaggaattggggagaagaatgggaaaaaagatgggagtgactgcataatgtcagcattttgtgcttttggctcagcatttggattggatggaggatgtaagtatagtttaaaagcaagaataagtatatttaggggccctatgataatttagggtattatctgaaagcaagaatctagtagccaagggagaaaccgcacacactaggtcaggggtccccaacccttgggccacagactggtactggtccatggcctcttaggaactgggccacacagcaggaggtgagcaagcattactgcccaagctccacctcctgtcagatcagcataagcattaaattctcataggaactcgaaccctattgtgaactgtgcatgcaagggatctaagtttctcgcttcttacgggaatctaatgcctaatgatctggggtggaacagtttcatcctgaaaccagccctccgtcgccaccgaccatggaataattgtcttccacgaaactcttccctggtgccaaaaaggtaggagaccactgcactagatgatgcacacactttgtccctcatcctagggcttttacttatggccacttaggagattcctaaggccacaagtcaagtagatggagagagtatcttgaaactttgtccaccttgcagcaatatgttgctaggtttgaaacatggagtcatgaggcattttgaaagccaataatatctacagtttattaagtattcactatgcatcaagtgcttyattacattattaatacatcaaccctatgaagtaggtgctattaaaaccctatttcactcagaaattgaggcacagagatctgcccaagattgcaaggaataagcggcaggaccagatctcttcatcacatttcacattccaaatcactcagctataaactccctaacatgacaggttgccatttagaggtaccaaatggttgtctgccctgctccttccttgatgccaaccagcctgattagcattgatcaaagaccaagccagagaggtagtcctctcccttttcaatttcatttcatttctttctttttctgaaacagggtattgctctgttgcccagcctggagtgcagtggcacaaatggctcactgcagccacaacctcctgggctcaagcaatcttcctacctcagcctctcattkttccatatctatatctcttatgcccaaaataaactttcccctgccccttgtctgcactaaactrtaagtttccaaaatgaacccttcccgtactctatttggtacacatcttgtctcctgaatagagtgtattttttattttattttattttggagacggagtctcgctctgtcacctaggctggagcgcagtggcacaatctcagttcaccgcaacctccgcctcccgggttcaagcaattctcctgcctcaacctcctgagtagctgggattacaggcgcatgtggccacgcccagctaattttttgtattttagtaaagatggggtttcaccatgttccccaggctggtctccaactcctgagctcaggcaatccacccgcctcagcctcccraagtgctaggattacaggtgtgagccaccgcagccggccatctcctgaatagattttaaatacctagaggtcagggatgattattcaatacatatatattgaatacttactatgtgttggacccggtgctagggttttatgtatatatttgagagctccacatccctggatctgaatcctccacttcccactggaaccatgcccctcccagtcccggtaagtaagagggaagatcgggagggccaaatcctacaccagggtctatcttarggagggaagggacctggctggggggagggggattctgaggagtgaaaccacttcctgtgtagctagttcctgtgttgacagaaagagcagaagaggaggtggggtggagggagcagagccagggattaggggactactgaggctctggagatgagaccgccaggagtccttccccaccatgagccccctccactcctgcagctggaggagtttttcccagtctcagtgctgccctggggcgagagagactgaacaagctgtttgggtgggaagagaatggaggaagttgacagggatgggcggggcccgtgggggggctgaccaggaacccagcttcctgctcagtacccaggcatccagcccccagctcacccccaccccttccagcccccactcccctcaggaacccaaggttccagccctcctcccaaatcccagccacccctcccccaccagtttctcccctctaggggatggaggctgagagaccccaggaagaagaggatggtgagcaggtgagctgggcacggggttggggaggctgacactgggaaagaagggaggtgagaggacctggggcagaaatgtagggacacaggggccttgaaagkcttgggcaaactgaggcaggaacagagacacacagagaggaaacgggccactggcctagccccctgtccactcctcccgcttcaaccaccactgcttgactagaatggacatattttggcatcagggcccccctcaggatgaggaaggctggccccctccaaactccaccactcggccttggcgatctgctcctccrtcccctcctcctccagggacccgccacacaggtacccctacccacccagggagagccccgaccctagtgcccacatcctgaccccattaccaaggcccactccattgtgggccctctccccacctcctccagactccccttgggattccccattgcaccccctctcctctgatccaaagtccctaatcacgtcaccctgtccacactcccccacggctcctgtctgccaacctctctgggtctctgagccctccacacccctctccccagccctgggaccccgctcggcctccctgctctccctgcagactgaactccttctggacctggtggctgaagcccagtcccgccgcctggaggagcagagggccaccttctacaccccccaaaacccctcaagcctagcccctgccccactccgtcctctcgaggacagagaacagctttacagcactatcctcagtcaccaggtaagacatccccccaggaggcaaacccaggcctcctggtctcttggcccctgttctctttggggctctactcctgtttctccctaggcaccccatcgccttcacaggtttcctatatgcctccccataccaacccttgatcctctcaagaacctcctcctctcagaccctcaccaaagctctccctctccctccactcctccagtgccagcggatggaagcccagcggtcagagcctcccctccctccaggggggcaagagctcctggagttgctgctgagagttcagggtgggggtcgaatggaggagcaaaggtcccggccccccacacacacctgctgagacttgagccccaaccagcccttccttgccactggtctcaaagctgggcagcccattgcatgccctcaactcttgcttggcaggggtaccagagactgaaagacacggcacaaatctcaatattcatctcccacatcaccttccctgggaactggacagggtgaaagtcctcaaactctgggaacaggcgagatggaacagggatttaactccccgcccacaggtccatgggagcttgaggcagtaagggggatcccaggcacccatctcaaggagtggctgggagtcttttccctaacttgtggggacaccaccagttgtcaagctactaggcagtagggtctgagggctcaggcctccacctgagaggttataacctgagagacagctctacccttcctcccagtaagaagggaaggtgggtgggcacctgagagattaagactattctcccagtcccactaccagcacccccgatccctgagactgaggggtttacgggctgtgaatggaccttcagccctgcccaccctccctccccmctgctgctgagtctgtctgatgttttggttgtgtgaataaatataattcccctctggactgcagactggtatctggggggcccaggcggggtgaaaggtaggaaggtgaggccagaggccttttctctccccagtctggccagaggccagctcccctccccggctggttaattactggctcattaagcagcggctggagacctccctaattatctcccccagcccccctcttcggttttaattaagtagaacagggaggggagtcattagaacaagaaataygaactgagctgccggtgaacccaggcattccagcggcctgagtccacatcgcttagatccctgattcaggacccaggtgacagacgcccccagccgccaacacagccccactcctaggccgcggaagtccagccagggggctttcccatatctttcagatggcccgtctcctcccctcatcccctcttccctctcccctcctccactaggtctcagttcctctgtttctgtgtctctctctccgcccccagctcctccctgttcctcctctcttctcccctcctcttcctctccggctcccctcccccagcctccctccctcgytccccccccttctccctcctccctcctccctctctctcacacacacccccgcttgggcctcctctctctctccggctccattttctccgccgccgggggccggggtctcctgtggggggcccagccggtatcccaggtctcccttcagtgccggggtgaacccccgggggagccgggagccgggggcagacgggcgggggttggggcggagggagcagcggccccagcgagtttggggggagaagtaaccaggcggggggaggggcggagcagrgagggggcctcaggscccccccccagctatggacgaacggctactggggccgccccctccaggcgggggccgggggggcctrggattggtgagtggggagcctgggggccctggcgagcctcccggtggcggagaccccggtgggggtagcgggggggtcccgggaggccgagggaagcaagacatcggggacattctgcagcagataatgaccatcaccgaccagagcctggacgaggcccaggccaagtgagtgcccccactccgggaccccacacagacccagcaaaccccgttcacatgttctgaatcttctgggagccccccccaactccagggccctctccaggatccaayagctctcttctctccttattcctgggagcccatagaaaagtgatccctctcaaacctcccttcacccccaggccctgaaaccttcacagagggaacccccggtggcccggctccccactcctaaccttttgscgacccctgcagtctcctggaacagccccatccccgggagccccctctggctcccagactaagaaactgttcttgggctacgttatcttctcccctaactctccacccagscccctcattctctccagatgtggagacctccacaccctctccagagcccctaaagctcctctccactgctcagccagacactaggtgcatcaaagcctcccacctgctcagccccaggaccccttcacacaccctacactgatctccccagttagctsggcacccccagcyccactctgccacctcaaactctgactcttctcaaccccagcytctstctctctccctctgaaacctaccaagtcactttcctttctccatccactcccagattcctcctcctacctttctagaccatctsccaaagsccgcagcctttaacctgctgcctgcatcttccctgtgtctccctgaagctgaggagcttccccatgctctgggagcwgatcttttcccaagaactcctcattccacccccaactcattccacccccaatccgcttcctccctccgsagactgaccctcctccctccttgttctcaggccccctgctctgtttctctagctcctcaacttttctctttccccactcccactcctcccaaggaaacacgccctaaactgccaccgaatgaagcctgctctctttagcgtcctgtgtgaaatcaaggagaaaactggtatgtgggcsccccccggattgctcaactctgggaacagaaccctgttcattatagggctagagtgtgacaacttggggccctgaggaaagtaaggagtcagggggactggggaaggaaccaaagcctgggaacttggctctccaggaagcaccaggaggactgagcactgggtattggggtctctgggtccctaagtccactcgcctgcatgctaggcctcagcattcggagctcccaggaggaggagccggtggacccacagctgatgcgcttggacaacatgcttctggcagagggtgtggctgggcccgagaaagggggcggctcagcagcagcagctgcagccgctgcagcctctggtggtggtgtgtcccctgacaactccatcgaacactcggactatcgcagcaaacttgcccagatccgtcacatataccactcggagctggagaagtatgagcaggtaaggagaggaggcttgggtgggtggagggaagggctcttgcaggggaatcccatggtcaaagggctcctcctcaccagcccacyggcccccactacaggcatgtaatgagttcacgacccatgtcatgaacctgctgagggagcagagccgcaccaggcccgtggcccccaaagagatggaacgcatggtgagcatcatccatcgaaagttcagcgccatccagatgcagctgaagcagagcacctgcgaggctgtgatgatcctgcgctcccgtttcctggatgccaggtgggcccagggaccccaggctggcccccagcactgggctccttcccattcctctccaagaccctgagctgccatgctgcacaacatggtactccatgacaatggtgactctggggtcatgccatgtgacagccctgccaggacatcaacatcctcctcacygctcttctccctcctctgtagacgaaagcgccgtaacttcagcaaacaggccactgaggtcctaaatgagtatttctactcccacctgagtaacccatatcctagtgaggaggccaaggaggagcttgccaaraagtgtggcatcaccgtgtctcaggtattatggaggttgcgggaggagttgtcaggcaaagtgcacgcatctcagctaggtgcagtggtgtgttcctgtaatcccagctactagggaggctgaagtgggaggatcacttgaattggagaccagcctgggcaacagcatagtgagaccmggaagcaaaaaaaaaaaaaatgctgtcactcacatcttattcagtgaaggacttcagaggcaaatgtttctacctgaccctcctttctgccccacaggtctccaactggtttggcaacaagaggattcgctataagaaaaacatcggaaagttccaagaggaggcaaacatctatgctgtcaagaccgccgtgtcagtcacccaggggggccacagccgcaccagctccccgacacccccttcctctgcaggtggatcccactgtcaccccrgctgactgttttgcacacttcctgcttttgttcccacttcctatctaggcaggatcatagcagagagggggccttttggggtgagagggaccgarctgagataggctggagatgtcaggggacagaggccattccagtgatcttagttctgcctttcttcccacgggtggccaaggaacagcctgctctttctgtgtgttggaatgttattttgtggataattggagtatagtagcatgtccccacaagagttgagagttgtggttcatcctctaccatcacgggctctattacactcttccctctctgcccccacaaggctctggcggctctttcaatctctcaggatctggagacatgtttctggggatgcctgggctcaacggagattcctattctgcttcccaggtcagatgcccatctcctctcgaatagggctttccccaactccatttcctctactttaggatacaagacctctttcctctgaggcttctcttcactgtcataccttcctctgctgcctgcaggtggaatcactccgacactcgatggggccagggggctatggggataacctcgggggaggccagatgtacagcccacgggaaatgagggtgagtggatcctgaagctcctctctgtccagttctcacaggacagaggggcattttccctagtaatgttgtgcccacacagggttcccagggctytctctgttttctgtactctgtctctcctttcaggcaaatggcagctggcaagaggctgtgaccccctcttcagtgacatccccaacggagggaccagggagtgttcactctgatacctccaactgatcttgcccctcagggtcacaggggtgggggstctcacaaggcgacttgaagaggacgcaggcttccagaggacaaaccccaatacaggagaagcacaagacagagaagggccaatggggtcatccsctccctaaygagactstctgtgctgggggtgctaattacatggcaggaagaatggggccyctaaggggagtgtggggtctgtctctcccttttttccawctttttcctctctcgckttctttcttacacagaaacatrcacataccsagaaacctatttctcagacccctttttctcctctgtctttctctctccctctcccacacctcacacacacatactcccacttgcaactattctgtttctctcctgggctcccccactttcccttccccaccccacttgtatgctctggaatctgtggagacgccagccctgcccaatcagagatgccaaaaatggggacatgacttctggacagaggacatgggccacgcccccatgcatccccacccccgcccctccggacggcttacttacctcatacgcagctcatcttaaaccaatagaatcgctcggtggacgagagtgtctgactcagatatctacctcggagggagtttctgctactttagggaattattgactgggctttggggttgaacttttttttttttaaagaaagaaaaagaaaccctgggatccatctgttttttttkttgttgttgttgtttttgttkttgktgktggtggtggtggtggtggttcttaatttttaatttagtttggggaagtagcttgtttttttttttataaatatgttgatttcttgtcttttttttttatttcttactttcccatattaggggtgatagccaaaggggttctggtaagagaaagggggacaaacagaactggtaaagagscccccctggctccaggcctgtccatcaggaagtaaattttacagggcaccaagctttgccccctaaaatcccttaggtgttctttgttcatgcaggcaggtttctgccgcatttgatgtggaggcagtgaagggcttgccctgctggcctctcatcccccttcttcccacaacccttgggcagggctggactcagtaattttgaggaaattgaagatgccatcttcccctgtgagtgacatgtctttaattttttaaaaaactactatttgaaaattggagggggaagaatgggaagggagttattgccaaatatgttaaatatgggttggggtgcttgtatatgtatcttcctcaatttccccataaatgaggtatctttttgtcacaccaaaatcaaggggtagggagagggaggaggttgcaaaaagccagatgtgggggaaaagtaacatcaacactgtcccatcctcagccctgaactagctaccatctgatcccctcagacattctcaggattttacaagactgtcagagtggggaacccctcccattaaagatccgggcaggactggggacaggttggaagtgtgatgggtgggggggtgggaggcatgggccgggggcagttctctcctcacttgtaaacttgtgtagtttcacagaaaaaaaacaaaatgcagttttaaataaagaaatttcttttttccctgggtttagttgagaatttttttcaaaaaacatgagaaaccccagaaaaaaaatgattttctttcacgaagytccaaacaggtttctctcctgttccccagccttgccttcatgatgcaggcccaawtgcacccttgcagacaacagtctggcctgaaccctattgatgcaactttgcgcaatcaagatggggctccagtgggtcaccaggcagccctgatggactgatggaataaataggatcgggggctctgagggaatgagaccctagagggtacactccccatcccccagggaagtgactgtacccagaggctggtagtacccaggggtggggtgataattatttctctagtacctgaaggactcttgtcccaaaggcatgaattcctagcattccctgtgacaagacgactgaaagatgggggctggagagagggtgcaggccccacctagggcggaggccacagcagggagaggggcagacagagccaggaccctggaaggaagcaggatggcwgccggaacagcagttggagcctgggtgctggtcctcagtctgtggggtgagccactcccycaaccccactgaccctccctgcagaaagcactttamccccacaccccagtcgtcctagaacttttcccagaacccgaggaagtgcctttcaaggtccctcacccaccctgtccaaattttgttagccctcattcccttcctacccctctaccatggtgctatctcccaggggcagtagtaggtgctcaaaacatcacagcccggattggcgagccactggtgctgaagtgtaagggggcccccaagaaaccaccccagcrgctggaatgraaactggtaagcggggctcctgttgcagcctcccaacttccagggagaccagcaatgatttggatccccgtcactctgcctcacagtcctttcccaaaggccttgcactgtttaggccctgcttctcwgcttctagaacacaggccggacagaagcttggaaggtcctgtctccccagggaggaggcccctgggacagtgtggctcgtgtccttcccaacrgctccctcttccttccggctgtsgggatccaggatgaggggattttccggtgccaggcaatgaacaggaatggaaaggagaccaagtccaactaccgagtccgtgtctaccgtaagaattccagggtcttctccaaggcctccctcttrcctaagaaaaagccttcaaccccagccttggcccatgagggcctctgacttccactggcctcatttccacayacagagtttgagaaccttcacaattacagsctctgactggatttttcctccttcagagattcctgggaagccagaaattgtagattctgcctctgaactcacggctggtgttcccaataaggtagtggaagaaagcaggagaagtagaaaacggccctgtgaacaggaggcgagtgtgtgtgggtgtgggtgtgtggcatctctcattttcaaaggattctgaggtcaccactctttccccaggtggggacatgtgtgtcagagggaagctaccctgcagggactcttagctggcacttggatgggaagcccctggtgcctaatgagaagggtgagtcctaaggtgccccccaagctgccttctccctgatctcactcccacacccaccctgggataatttgtcttatcctcccatcataggagtatctgtgaaggaacagaccaggagacaccctgagacagggctcttcacactgcagtcggagctaatggtgaccccagcccggggaggagatccccgtcccaccttctcctgtagcttcagcccaggccttccccgacaccgggccttgcgcacagcccccatccagccccgtgtctggggtgagcataggtggggagggccccaagctcacgtgagcacgttctggaagtctgacccttagggaaagagggagtcaagcccatggccactgggatcactcacaagtgtaactctccacctcaaaacccttccaactcccagagcctgtgcctctggaggaggtccaattggtggtggagccagaaggtggagcagtagctcctggtggaaccgtaaccctgacctgtgaagtccctgcccagccctctcctcaaatccactggatgaaggatgtgagtgacctggagagaggggctgggaggtagggtgaaccataactakcaacagggagggcagagggctaacgagggaaaggcaggctaggagctgaggaggaagagagggtatctgaagatatggagacaaaaagacaagggttttgaaatagtctcctctccccttcccccaccagggtgtgcccttgccccttccccccagccctgtgctgatcctccctgagatagggcctcaggaccagggaacctacagctgtgtggccacccattccagccacgggccccaggaaagccgtgctgtcagcatcagcatcatcggtgagacctctccccaagccctacagaccctgggactagggtgcaggacagcacaggctctaatttcctgccccattctggccttatccctaacagccaccccacctctccctccatgcacccacacccaagcctcccctrccccacccaaattctgccaagagagcagccaagcctctcccttcttccctctgagctaaaaaaaggracagacggctgggcgcggtggctcacgcctgtaatcccaacactttgggaggytgaggcrggcagatcacctgaggtagggagttcgagaccagcctgaccaacatggagaaaccccatttctactaaaaatacaaaattagccaggcatggtggcacatgcctgtaatcccagctacctgggaggccagctacttgagaggctgaggcaggagaattgcttgaacccaggaggcatagattgygatgagccaagatcgcaccattgcatgccagcctsggcaacaaaagtgaaactccatctcaaaaaaaaaaagaaagggaaagactccactggggctcccactaaataaccctctctcaacccgaagtcttcctttctgactggatccaactttgtcttccagaaccaggcgaggaggggccaactgcaggtgaggggtttgataaagtcagggaagcagaagatagcccccaacacatgtgactggggggatggtcaacaagaaaggaatggtgagtggtggtggctgtgctctcaattttccctgtctccrtacaggctctgtgggaggatcagggctgggaactctagccctggccctggggatcctgggaggcctggggacagccgccctgctcattggggtcatcttgtggcaaaggcggcaacgccgaggagaggagaggtgagtggagaaagccagacccctcagacctagggcttccaggcagcaagcgaagaggggtcggggggtggaacgacaacgtgccgcattccccccaatctttctcctcaggaaggccccagaaaaccaggaggaagaggaggagcgtgcagaactgaatcagtcggaggaacctgaggcaggcgagagtagtactggagggccttgaggggcccacagacagatcccatccatcagctcccttttctttttcccttgaactgttctggcctcagaccaactctctcctgtataatctctctcctgtataaccccaccttgccaagctttcttctacaaccagagccccccacaatgatgattaaacacctgacacatcttgctcttgtgtgtctgtgtgtgtgtatgagacacaacctcacccctatacccttgagggccctgaaggaaagggactcacccccatacttcaccatactataccaaacatctactcaagttggggagaagatgcttctgtcgggggtgggggcgaacttgggaagagatcccatcaatatatttcaccttttttattgaatttgtattaaaggaggtagtgagggggcggaagcacttaaragtcaraatccatattagactctggggagtgaaaaattaaattaaatcagtaagatggggagtgggggaagagtcaragggaactttgcccacctttgaagatsaaatcaagaaatcagggaaagcaaagacttaggagaggagaaagacattctctcaatccatcctccttccccagggcagagaattaaacaacgttactgagtgagcctctgagcagaaggctctcccatctatgcacagacttcactcctcctccccaggccttcctggacaatgtccarggctggccttagccaacagaaatagaggggtcaagggggtccaggagtamggaagggtcagcagggaccctcaatactgattcttctctggctggaggtgggcaggaagcagacatagctcaaatactgagcagccaaaaaaagaagaagatggcgagaaacaggaagagggaatcctgccagctggaggcygggtgaccctgtcccagatccacacctgtgggagagaggaaagctgtggaagcatatgctcctaggctgggagggggcctgaggggattcacagggctccctsatgggagctgagtgtgactcttacctgtaccccggcggaaaggctcatgggcattgaagacggtggtgaaaaagccaaagggaaaagcaccaacaccaaatgagaagtggaagcccccggtatcaccaaatggctggaatccctagggaggcagaaaaagtcagacrggaagccggcaaatctgtcaaggaagggacacaactggacaagaagactcacccctctgctctcyggagctggtctctggccctgggggcggggtggagttttyaatctgaggaagtggagagagaaagttaacagggatttttctcctcccatcttccacaccgttttccaagggcagaagccttcaatcttccctaagcaacacctccagtctctcacctgggatcctggggcttctggctccctcgcccataaagcgggacaaccttctctctgctgatmccagctttacatactggacactcttgccgttctggccgtgtctccagccactggggagaaaaaaggtggtttccagtatacaagagggtcttacagctcctcagacctccccatttccctcttcatctcctgagtacgcacctgatgaagacatggccaactggatgggggagaaaaaaaaaaaaaggtcaaactagctacagaaaagagagacacagaccctagacttcgcagaatcccatctaacccctcttcccaagcaacctgctgttgcttttcagattttctgcaacctctaccatgccagccaacttagttagccttcctgcttgtctgatcttccaacacctaaagctctgtccatcctcaacacactcaaccctctcctttctcctctccccaacaaacacrtacaaattttcgtgccctctcttttctgcctttcaagttaatttctaatttccttcagccacctctttcygggtctcctcttttcaaccccaaccccatcactccaaaccaaacccctttactagcacattcccccattactcactttcaagctcaataatgtccctatctttatgaccctttaacctttcaagtctgcctctccacagtgcccttataccagccccctcccagatctcatctgaatgtgatccatatttcctggttctccccgactcaactgatgcgtgcctcccttaacctttgtgtctcacttgtttccacctgcacagctaagacccctcacttctctggggtaaggtggctcgggtctcacattgtcctgccaytccccgccccaccttctcttctcagcacatcacrtgcctcagctcctggttcctaagacctttctttccacagatctcgaccgttatactcccacccacacataccagcaaagtcttatgtctcctgtcgggcttcacctatgggaacgtgccctccgattatctgtatgactgtatgattattckctcctagcctctccagtatataagcgagacccaccacctcccgcccccctcctcgattctcaccagtacaggtggccacacacactgaccacagcttcccgagcagtctccaaacatatattacattcgaaggtcgcgcccgccccgccccgctcgcgatttggcccttcggggcccccgtcctcctcctccgctgctgccatggccggttttgtttcgccccacgtacccttcagtccccccaaatacacatacacacgccccaacaaaccagaaaccacctcctgcccacgatcgttgggcaggcttcaaggtttcctaatcactattggtctgaatgcctgccagtcacaaagaattcaaaagaaaggattggcccaaagggtaggggcgggaaaaggttagtgcagtcctgccttcgcacaatggctattggctgatacggtctaagtcaatgtgcaatgccaagggattggtaataactcgctacacsctgtcscctggccaaggagggctttattcgtctgagtagttgtcagtcataaccaaagccataagcaatttgctcgggactacctatagacctcgcccactataagcccctttctttccttcgcttcctcttytagagaatgtccggattgctattggactttggagcgtatggctccaaatcaactcattggctaaaacttgmcggaaaatggtggttaggtaaaacgcgcctgcgcagcacgcggcgggacgggggtgggccaatcctgtgagggtttaaccttctcttkttccacctcttcacccctatcttgtcgccatggtgactgctctacaattggcgaggcttgcacttcaaagtcctaggctcgcttcatccgggtccttcrgctgtggactttctgctgattgggccttttccttttcccctgattggccgacatcgggaaagacggcgaagagctaggaaaagagggaaaacactagggtcgcagggttcaaaatggctccaacctcctttggtgacgtagagagcagaacttgggtctgcccctcccttttagttaagggagcagaactgggattagcccgacgtttggatagtgggaacatcgatctgcggcgctggtgttaacccaactcattcggctggacgactcagccctccccatattaggtgatttacagagcaaaactgaactaaaggcccacccctttcttaatgttgtacacagagtagaacaggattgacttcaactccgttttaaaccttcagagcaggaaagctctggrctcaacccctttgtgagtggtgcaaaagggacaaagcccgccccttttaaggagacccgcggaggctagacccgccctttcctctttataatttgcccatcagaaatagggtcttcttcccaggttggaccccggggagtttgggcttttcctacaatcactgaccctcactgtgactaaaggagcagaattaggtaacagtcctcccactaccaatcctcttcccgagggcatgtaaactaatgcagggtaaaggtgtggctagaggggggaccttgataaaagatcccatgtgactcaagagtaaggaaagatgagaagttagcagttgcgtaaagaaggactggggcagatgaggattcaggaagcttgaggtttaggaaggaagatattgagagggaaaggtggaaatgaaggagagtgaagtgatggaatgatcctagtaaagggataatgggagtggaggaagagaagagggggtggaaaactagatacatggctaccaaattaaggaggcacgcgcattccagaggaatcggcattcttcctcactttttatttttctagaaagcacccctgaagccaaatttccattggaagaaaagatgtacccatattgtatgttgtgagaaggggttgtctcagcttgggcaagtaaggagactgatacgaagraagtaggaaagaaaaggtacagaggtaaaagagcatggaaaaggaaagggtcagggataaggccaaagagatctcttctctttaaaggccagagaaggcaggtggaggggggagctggactgctgggagatagtgagggacaaagggcaaaggaaaccagaccagaggactggagagtgagatggagtgagatggagtcctggagagaaaaagaagagaggtgaacttaatgcttgtcatatggtaggtagatgcttgataaatgtttagaattgaatgggtacgggaaaaggggtccttaagaatagttggggggaataagcagcagataaccggagttgagaaaaaaagagaccaagtaaaagtggcagttaaaagagagctgatggagaataaaggaaggaatgtgcggaaggaggaatacagcaccaggggatccagagctgaaagggagttagagaaaaaaaagatgcagctggagccagagatgggggcaaagaccgagggagagccctgggscggggctcgcaagaggacactggtagatgtggggaggagatgccagagtttctgggagacgattggcaaaacaggctgcccatcaccgccctccacttcctggccggccccggaaaccagcaggcgttggggaggggtggcgggggaatagcggcggcagcagccccagccctcagagagacagcagaaagggagggagggagggtgctggggggacagccccccaccattcctaccgctatgggcccaacctcccactcccacctcccctccatcggccggggctaggacacccccaaatcccgtcgcccccttggcaccgacaccccgacagagacagagacacagccatccgccaccaccgctgccgcagcctggctggggagggggccagccccccaggccccctacccctctgaggtgtgggcgggaaagggatgggaggaggagggaagagggtgctgaaagcgactaggatgaggggaaggggagagattgggtctgggagggccgactgggggagagggttgctggggaaaggagaggggccgactgggaagagggttgctggggataggagaggggacctgagagggaggaaggatggaagagacctgggagggaggagaaatggaaacccttgtgaatttgggactgggagcgtgcacagggaatcctggagagggaattccctacaccttccccaattccttttcttgccctttgaccccacatgactcttgaagggtcatgaggggagaaggccagcagaatttgcctcttaggaatacccttaggtgcctctgtttccatctaggcacaggacctcttgtttctcagtggccttccacactgctagacccttactgacacacaaatgccttatgggagccatgttttctacattgagtctgtgtgcctttgacatgtttaatggcttgtgtgcaactaggttgtcccaatgctatccataggctgtgtagaaatggtgtgttattttctatcagaattgcccattcttcattcttgtgtccatgtctcacatccagttttgacatgttttaagtaccgcatgtgtgtgagttttcatatattgcacctgttctataatttcatgttacttgcacattttatgttttggcatgtttatttcagcatgtgaaggttatataccttattttgctttggctgacatgtccatggtcctaccatttgcagtagtcttcatgtgtgggatcccatggcttggctgaataccccacactctgatgtctgactgaattggcctgtttgctgtgttttcccagtcamagttcacagaacacatgtgtatgcgcctttgcatgatacactgatgtaacaggaccatagaatgtgtgttataaatttgtcatcagtatattttgtgagccgtatgctcattaaatttggccctccattgcatttctaaatccttggacttttgttctccaaagagggtcacttaatatcaagtgttaagagaagaaggtaactgggtctccaggtctgcaaagaaccatccctgcatgccttaccttggtgacctccctggcccatacctctctacacaaacattatctttccagtggctgtgtacagtctgtgtccatgagctcaatgcatgtcacagggtcaatcctgctgtgaaccccattgttggtatttatttatggacattatcctccattctttgcactgttggcacacatttgatgagagcagcatctttccctgtggcatcttgatcccattcggtacatttctcttgtgagatgacctcttcctgattattgttactctgccttcattatggctatgtattgcatgtatctattcagagtcggttaccattaggcttggtgtgttcgttactttctcagtgacttcttttagtagtcacttctactcaagaggataactatctaatttgtgatcagaaccgccatctctgtcattaactgtggctctatgggtgggtatacagccttagaatctgttcagcaagtgtttattgagcacctactccatctcctattgtcctggcactggagataagacagagtccctgtccttaagctgcttacagcctaaggagggaaacaaaaaygccagtcaacacatagtgtgttgtcaagatcagtggttcttaaattcaggcgcacatcagactcaccagagggcttgttgaaatacagattgctagccagccacgatggctcacacctgtaatcccaacagtttggaaggctgaggcaggaggatcgcgtgagtccaggagttcaaaaccagcctgagtgacagagtgagaaaaagaaaaacagattgctggacctaatgcccagaatttctgattcagtagatctggggtgaagtctaataatttgcatttctatacttcgagacccgctgatcaagataaaagtgtaaggaaagcacaggcctggaggggttcaggcagccctccaaaaggtgacactgagctgtgtgaggcaggagaagagacaggcattccagccaaagggaacagcatgttcaaggtggggaagcatgaaagatcatggtgtctgaggaactgaagtgaatcagtttgactggaacaaagagttttgtgaggatgtggtcgaagatgtaagcagaagtcaacttatcaagaagagcctttaggcaagacagggaaatgctctgtgtttcagaaaaatctgtgctaacagaaaaatctctgtggttgctacgtggaagatggattggagggagttgggagcctactccacatagttcaggggagaaatgatgctgttctgaacttgtaggggcagtgggatggagcagctcagaaagcctacggtattccaactggcagggtctcctgtttcctctattgcctgttaccttctcgcttggcaataggcttacctttgagcatagcccttcccatcatgggaagacagtgcctgtggcctcagtaggaatgacaggtatttgccwgaacaccctttttgtgaattgttaccctgcccccaacactggggcagagtggaggaaggaggaagaacctagaacacaggttctgtgttcctgcctctcttcctcttgagccctttcctctcccagggcaagtgctgttaggtcacctttactccattccctccttttttcacttggtgaggcctcacacactgtacctgcccacgcaaagtgtcactagaaggaagggaaagggtagtaggattcgtttgcctgtctggaggtaggattggtctttgtagctattccaggtatgtccataagtttacctaggaataggggagctgcctgggtggagagggatttttctagttatgcatttacattcttttatctgtcactgggtgtaattataaatttgtgtctatgtgtgaacatgttagtctttgtatgactgtgtgtctgttggcattagtgacacgaacttttaatcttgccatttggcccttgggtatatggctgtgagtgttctgtcacartcaccatatatgctgtgtgctgtgttcgtatatatatatgcaatacataccagtgtcagcgtaatggagtggttaggaacacaggcggcttagatttaacctagaaactgctgtttaggagctgtatgacctcaggtaagttatttagcctccctgggcctatttcctataaaatgtaaatagtaatagtactttctagactatcatatkcatcattttaagagtttaacttaatgtatagaccagtactgttctacagaaatataatgcaagccacaatgtaatttttttatggtagccacatttttacaaggcaaaaagagtgaaattaattttagtaatatattttcttgaatctgataacatccaaaagattataatttctttttttttttttggaaatggagtctcactccattgcccaggctagagtgcagtggcgtgatcttggctcactgcaacctccgcctcccggattcaagcrattctcctgcctcagcctcccgagtagctgggattaaaggcatgcgccaacaggcccggctaatttttgtatttttagtagagacggggtttcaccatgttggtcaggctggtcctgaactcctgacctcgtgatctgcccacctcggcttcccaaagtgctgggattacaggcgtgagccactgcgccyggcccaagattataatttcaaaatgtagtcagcataaaagattagtaatggatatctcacattttgttttttattcagtctttgaaatctgatgtgtattttacatttccagcacatctcagttcagactagctgcatttcaagtagccacatgtaggtggtggctactttctcggacagcacaagtatagaccattataagacccttaccagctacaagtgttagctattattcttgttgtcatttrttatcaggtatctgtgaattgtagatgtctgtgtcttgtgtctcttgtctgaatatatccggagcctttgggaagagtggtgggagagcagtcctgagctctttctccaccaccctcatcctagagagccttcctgggaaggtttcaatgagacccctgccccagtttgtgtctcaggcccttgtcctcatagcaccagcccccagccctgccttctgtgccttgcctaccccactctcctccagaaaccaggctgattgtcccttgccccatcccctgcaggtggccagaatggatttgtggccaggggcatggatgctgctgctgctgctcttcctgctgctgctcttcctgctgcccaccctgtggttctgcagcyccagtgccaagtacttcttcaagatggccttctacaatggctggatcctcttcctggctgtgctcgccatccctgtgtgtgccgtgcgaggacgcaacgtcgagaacatgaagtgaggggcaaggggtcttgggcaatgagggaacctaagggtacaaagtgagtagtggattgggggaagggggcatggtgtgtgtagaaaagactgagagagaccagagacagggaatggggagaggactgcaaaggtggtcagaaagacagtaaggtggggggagctgaggcatgcagatggacatcaatggatcccactgggaccccttgccatgaccccacaggatcttgcgtctaatgctgctccacatcaaatacctgtacgggatccgagtggaggtgcgaggggctcaccacttccctccctcgcagccctatgttgttgtctccaaccaccagagctctctcgatctgcttggtgagaccccaccacagggcacacctcccccagccatgcctcccctcctgaaaccttccctagaatatcttctcctagagatcctcaattccccttcctctgggacattgcccccttgcctcccactcaggccttcattccctgggtagaactgccctcataagcaggktacatatacttttggtcaccctttccttcacttggggcccccctccctgcctagtctcctccttcacctccagtccctaccagagggtgatgagctgggtgaggtgggttgccttctgtgacactctgcctccaccccgatcctcacccactcccaccctgcccaagggatgatggaggtactgccaggccgctgtgtgcccattgccaagcgcgagctactgtgggctggctctgccgggctggcctgctggctggcaggagtcatcttcatcgaccggaagcgcacgggggatgccatcagtgtcatgtctgaggtcgcccagaccctgctcacccaggacgtgagtcatcctggggaaatgggggattggagggatacagagtagaacagttgtaaataaactgatatgcagggccagtgggcctcaaaggtcccattataacatcacacctattctgactcctccatatgtatttgtcttctttgaccctctttctcccccaggtgagggtctgggtgtttcctgagggaacgagaaaccacaatggctccatgctgcccttcaaacgtggcgccttccatcttgcagtgcaggcccaggtgactactgctcttcgttctgctactcagctgccaacccccaccattccctcatctctgggcaggggcttattgtaggagtctctgaagagagctgtggactgacctgctttaacccttccccaggttcccattgtcccyatagtcatgtcctcctaccaagacttctactgcaagaaggagcgtcgcttcacctcgggtgagggctttgagcagttctggggtagggtgtgtccggagaggctgggaggacatccctgtgaggcagggggatcattcagtgtcagagccatgagatgtctacacagtcatctagtctaaccccacatcagccaataagtctttactaagcacccaccataccctgccagatgggtagcacttggtcccaccaagagaggctgttactaatcttaacaggaaagataaggcctgtgtgcacaaagctgtaatgaataacactcattcagcagtaaatgccaaacccagaggaggggggctggaggggtgctgaggagatgtctgaactggggattggagaaggctttgtataggagaagggcctcagaagtggcagctggcaagcccagggatggttgtccagggttgggggaagagaactgaaaggttgaggaagagtatcactcggaagctgggccccacctgtgggcaaagacctgggtggacaggccatgatggtgctccccttgccccaggacaatgtcaggtgcgggtgctgcccccagtgcccacggaagggctgacaccagatgacgtcccagctctggctgacagagtccggcactccatgctcactgttttccgggaaatctccactgatggccggggtggtggtgactatctgaagaagcctgggggcggtgggtgaaccctggctctgagctctcctcccatctgtccccatcttcctccccacacctacccacccagtgggccctgaagcagggccaaaccctcttccttgtctcccctctccccacttattctcctmtttggaatcttcaacttctgaagtgaatgtggatacagcgccactcctgccccctcttggccccatccatggactcttgcctcggtgcagtytccactcttgacccccacctcctactgtcttgtctgtgggacagttgcctccccctcatctccagtgactcagcctacacaagggaggggaacattccatccccagtggagtctcttcctatgtggtcttctctacccctctaccccacattggccagtggactcatccattctttggaacaaatcccccccactccaaagtccatggattcaatggactcatccatttgtgaggaggacttctcgccctctggctggaagctgatacctgaagcactcccaggctcatcmtgggagctttcctcagcaccttcaccttccctcccagtgtagcctcctgtcagtgggggctggacccttctaattcagaggtctcatgcctgcccttgcccagatgcccagggtcgtgcactctctgggataccagttcagtctccacatttctggttttctgtccccatagtacagttcttcagtggacatgaccccacccagccccctgcagccctgctgcaccatctcaccagacacaaggggaagaagcagacatcaggtgctgcactcacttytgccccctggggagttggggaaaggaacgaaccctggctggaggggataggagggcttttaatttatttctttttctgttgaggcttccccctctctgagccagttttcatttyttcctggtggcattagccactccctgcctctcactccagacctgttcccmcaactggggaggtaggctgggagcaaaaggagagggtgggacccagttttgcgtggttggtttttattaattatyyggataacagcaaaaaaactgaaaataaagagagagagagatctgggtgttggtggttgcatttgttaaggaattgaagaagcagttcttgcccaggcaacctgcccccagccagaagactcaggggcaggccaagaacacaggcctccccstttcttcagctctctgaagtttccattgttcattgctctttggtggctgatagccttatctgcagctcacagtcggccaatcccagaggattagtgggtccggtttctgtataaattagggggcaggggtgctgtagaggcttcttatcgatgattgacgccgaggcccaggctgttgtcctcacaggagcctggttaatgacatggcagacacagtggctgtggtcagcctggagtggactacactgccactctcaccaaacaataagtgaaactgttgggctggggacaggatttcagaagagaacgatggtaaagtggagaggcatgaggatagtgaatgttggagaggggcttggaggaaagagggaatgcctgaatggagaggggtcttggggaaagttggggaatagaagtcaaggcgggaggagtgtgaggactcacaggcacmtagcctctcctccagcagcagcacctggtcgctgagagattcgatccggtcaccccggccccacagctcagccacctgttctggctgcagctcttcaggcggcacgggcagcaccgctctgacccaggccccagcctgaccggcccactagaaaggaagagatscctcagggtattgacagtgacgtctggcctcgccccacccagcaggcttggctcacctgctccagccgctccaggcgccctcgcagctcgtgaatctcctgcttcagagcgcgctcatctttttcykcctcccgaactagggacaaaggagaccaagagtgtgaccactacccgagcccggacgcccgtcccgagtccctcgggtggcccgtactcctgcccactcaccggccacgctgagtatgctggcactggttgggggctctggggacccctccatgcaggtgcgcccgtccacgcctagcactaggtcatgggggcagccgcaggtgaagctgcctgccgtattaaaacaatggtgcgagcagagggtgatgctggtcctacattcatccacgtctagttaccgaaaaaaggaaggggctgagagagggrgcrggggcaagcacctgggtaggtggggaggacaagctgactcacccacatgacagtgcttccctccccagccgggggcgcactcgcactggtcaggcctaacgcagacgcctccgttcaggcaaggcttggcgcagatggctgaggacagaggaagtggggttcagactcraaccgacgacccagctccccagctccgtggggcgcgcctcccgcaaggcccggaagacccagcctcaccttcacaggtgagcgcccccgggtgccgcttcttccagccctggcagcacactgcatgggtctgctgaacctcccgcytcacctcccgccacataacgcggtacatggtcctggaacacagcgcccggctcaggaccctgagtacgggtcctagttggggttcttggggtcccatctccccatccctcacctgtaagtgctgcagatgcgcctcccagcgcacaaggtcaggtagggcttgtacactggttggctgtaggactcgttgtagtggagcgggaccaccagtgtctgcttggagcagactccctgactgcgtccatgccagaggatgaggtgggagagattgagtaggccaggccctggggagccaggagtcccacttccctcaagaggctactgaggccccccgctctccctccagatgacagcctctcacccccattctaaacttacagttatgttttgcctcctgtgaagccccacccccagcagaaggctcctgagaagagctcaccccgggccctaccccctctgttgtcacctctctctgagggatccacccttggccccctcgcctggtatcagtagcaggaggaaggagaatccgcctaagagagtgcacagctcagccctggaccccatgattcgctttgacgctggaccctacaggctgcaggcaagaaaaggttaatggatgcccgtcccctctcctattaatttctccagcactagtccctccaagggcactctgcaggtaccctctaagggagtcaggacattcacttttacatactagccaccaggattgcctacacctgtgtgtacaacccaacactatcctgtccttagcatatcatgatcctttcagcatcataaaagctcacaccccagcacactccctccacctcccctctaacctacttacttctaatcccctctgcacaacctggagggacacacagtcaaccctccccttatgaccctcctgtctttttttgggtttttttttgtttttgtttttgagaaggagtttcgctcttactacccaggctggaatgcaatggcatgttcttgcctcaccgcacgacctccgccccccaggttcaagtgattctcctgcctcagcctcccaaatagctgggattacaggcatgcgccaccacgcctggctaattttgttttgttttgttttgtagggtgtgagggtatatagctagggttttttttttttggttttttttttgttgttgttttttgagacggagtctcgctgtcaccctggctggagtgcagtggtgcgatctcggcttgctgcaagctccgcctcccgggttcatgccattctcctgcctcagcctcccgagtagctgggactacaggcgcctgccaccacgcccggctaattttgttttgtatttttagtagagacggggtttctccatgttggtcaggctggtctcgaactcccgacttcaggtgatccgcctgccttggcctcccaaagtgctgggattacaggtgtgagccaccatgcctggccaaccctcctgtctttaacatgccctcttataacttcataccttcaaaaccctagctggttgggcgcggtggctcacacctgtaatcccagcactttgggaggctgaggtgggtggatcatgaggtcaggagttcgagaccagcctggccaagatggtgaaaccccatctctactaaaaaatacaaaaaattagccaggcgcagtggtggacgcctgtaatcccagctactcgggaagctgaggcaggagaatcccttgaaccctggaggcagaggttgcagtgaaccaagatcatgccactgcactctagcctgggcracagagcaagactccgtctcaaaaaaacaaacaaaacaaacaaacaaaaaaaacccctagctatataccttcacaccgtacacacaaaccaagcacctggaaactccacacctttcacacactgctactcccctcayatacccacaccgtcacataacgccctaaatgcacatcccttgctccaacaaaacaccccgcaactcatgcccaccctaaggctctgagtaaaccccactctttccccatttgaaattctctccccacttgccttcctctctctctccattcccacctggcttctttctcctgggaggcttcaagcagaccagcctcagcagaagcagctcagactggtgggtgggcctggcaggctaagaaggagaggaggggctgggccagagagtcctcccattcctgccccctcccacaagcctcctccttagctccagcagggtcagctcagtagggtcaagtcccactaccctcatccccaycccagcaaagggctccctagaagtatctttccaaccctctgaggcccctatttctggactccccagatcagaagctatgagctctgtaacaccaccagtacccccttgaacccaaaacagactaggggagagttagggggcagggagagaaccagctgcagggaacaaagcagttcaggttatgggagaaaaagcaagatcagctgaggaaagctagaagggcaagtcgtcacaaaggggcaggggggcagcccagggcascaaggggaaaactgcccccctctcttcatgacatttgttagggcttagggggaacagaattgagtcagccaccaccccccatgccagaacagacagggccctattgtctcagccaaaattccttctttcaaggaagaggaggctcattgtccagccctacacccagctctggcccacaaagctcaaaagcggcacaacgaatgcccaccctgaccctctgccccctcgtctagcctgggggtggcaggcgcattccacccatgaggctgaggcccaaaccactggagccctgagcttaaccccccagtcttggggactgggagaggaagagaattgtcttcagcaggaaagaacccgcagagaaccaggaacccacaaagaatgggcattgagagagagcggaaacaccaagggggtccccaccctagaccaggcatctgggcacccaggcctcaggctccrcccccaccctccttggggagccaggtcccctccacctggaaatgagccaagtcacactgaggaaatggaactttatttccataaatacagggataacacctattcaaaggtagttaaaagagggcctggggcctcaaagaaactaggctctcccaggggggtactccaacactgatcatagggactgggggatccccaaacctgagatgggcctcataggccacagatattccccaacactgacacttcaagaacggaactgtccccataggggagcctcadaaccccactctcatgggtagtccctcttaggagttgggagggctgatgtcaggrgactttagagaaaaaagggaacatggggaggagagaagctaaaaatgtcctgagtggcctggaaggagacccctgtggtgggcagggggtgggttctccacccatacagccagatacggaggagyagcagcagcaaaagcagccacaagttaaaaacatggtttctcacttcccaacttcggccttgagagaaagggacagcacggagcaatcccccaaatgagaggacatgaggtsggggaggcctggaattgtcattcatggaggagcagaggaagggggttctgggaggccaagtctctactaaaaccccgtctctactaaaaatgggggataatatgggagcaatgaggtggtcacaggcacaccaaagcctgacatctgctttccaaggccaccacttggtctctggaccgaggagttcctggggacccctgaatatatcctcaggagagccaaggttcaatgcaggtctcataaagggtacggttggagtgccaggctgtgtgggagataccggccattggacacctcactatggccccccgggccaatagagtcttcaacccaaaagaatcccgcagataaaccttcaaggtggtcgaaggggcgtggaagyatggaagagagacacaaggagagacaaagtgagttactgctgggatcctggacctcctccccacagggtgaacccttcagctcaggagtcacagagagggctctggaataaggtgggacagcggctagaaggggaagtaatcccagggggctcaccagttgctcctccatctccaggacggtctcatttgcatcatagaaaccaaagaagctacaaagagatttgsggggaggttatcagaagagctggagaaaatctggccgggcgcagtggcacacgcctgtaattgcagcactttgggaggccaaggagggcaaatcacctgaggccaggagttcaagaccagcctgaccaaaatggtgaaaccccatctctactaaaaatacaaaaattagctgggcatggtggcagatgcctgcaagcccagctacccaagaggctgaggcaggataattacttgaacccgggaggtggaggttgcattgagtcgagatcgcaccactgcacttcagcctgggtgacagagcgggaccccatctcaaaaaggaaaggaaaggaaaaaggaaagaaaaaagaaaaggaaaaaagaaaggaagaaatcaaggtgggctaaggtcccaaaggaacccaaggcctactggggagacaggtagcagggaggacactcaaaactaccttactggatataatgtacttcatgaggtgatacactgaagatacgacctcacttctgtagaaaccccatcaaaaatgcattactggccgggcgaggtggctcacacctgtaatcccagcactttgggaggccaaggccggcggatcacctgaggtcgggagttcaagaccagcctggccaacgtggtgaaaccccatctctactaaaaatacaaaattagctgggcgtggtggctcaagcctgtaatcccagcactttgggaggccgaggagggtggatcatctgaggtcaggaattcgagaccagcctggccaacacggagaaacccygtctctactaaaaatacaaaattagctgggcgtggtggrcgcctgtaatcccagctactcaggaggcagaggcaggagaattgcttgattctgggacgcaaaggttgcagtgagccgggatggcgccactgcactccagcctggcgacagagtgagactttgtctcaaaaaaaaaaaaaaaaraggccaggtgtggtggctcatgcctgtaatcccagcactttgggagaccaaggagggtggatcacctgaggtcaggagttcaagaccagcctggccaacatggagaaaccccgtctctactaaaaatacaaaattagttgggcatggtggtgggcgcctataatcccagctactcaggaggctaagacaggagaatcacttgaacctggcaggcggaggttgcagtgggccgagatttgccattgcactccagcctgggcaacaagagtgaaactccaactcaaacaaacaaacaaacaaaaagatactaaagagacgtaacaagatcatgcaactcaagatcctgatttggatcttccactgtatatttttttctgtaaggacagttggaaaaatttgaataatctgtgagcgcatattcaggaaaatttgaatctatgtttatatttaaatataacattaacgtatataaataaatgtatatatatttagagaaaaaagatattaatgtaaacatgacaaaatgttaacatttgcgaaatctaggtgaggagtataaatgactgctttttgctattttggtaacttttttttttttttttgagacagggtcttactctgtcacccaggcaggagtgcaatggtgagatctcggctcactgcagccttggcctcctaggctcaagcaattctcgtacctcagcctcccaagtagctgggactacaagggcacaccaccacgcccagctaatttttgtattttaggtaaagacagggttttgccatgttgcccaggctggtctcaaacccctgggctcatgcctcggcctcccaaagtgctaggattacaggcgcaaacttttcttaagtatgaaattatttcaaaatagaaaggtcttaaaatcctttttttcttttttttttgagacagagccttgctctgtcacccaggctggagtgcagtggcaccctgtcggctcattgcaacctccgcctcctggtttcaagttctcctgcctcagcctcctgagtagctggaactacaggcgtgcgccaccaggcccactaatttttgtrtttttagtagagatggggtttctcaatgttagccagctgttctcgaactcctgacctcaggtgatccacccgcctcggcttcccaaagtgctgggattataggcgtgagccaccgcacccagccagatggagttaaaatcttttaattaaaaaatattggccaggcaaggccgggtgcgtgggctcacgcctataatcctagcactttgggaggccgaggcgggtggatcacgaggtcaggagatcgaaaccatcctggctaacacagtgaaaccccgtctctactaaaaatacaaaaaaattagccgggcgtggtggcgggtgcctgtagtcccagcgactcaggaggctgaggcaggagaatggcgtgaacctgggaggcagagcttgcagtgagccgagatcacgccactgcactccagcctgggcgaccgagcgaagactccaactcaaaaaatatatatctatctatatatagagagagatatatattggccaggcgcagtggctcacgcctgtaatcccaacactttgggaggccgaagcaggcggatcacaaggtcaggagatcgagaccatcctggctaacacagtgaaaccccgtctctaccagaaatactaaaaattagccaggcatggtggtgggcacctgtagtcccagccacttgggaggtgaggcaggagaatggcttgaacccaggaggcggaggttgcagtgagccgagattgtgctattacactctagcctgggcgacaagaacaaaactctgtctcaaaaaaaaaaaaaaggaagaaacagtgacttggaacattaaaaatgttatataaccatgagctatcactgtcattcatagggttgtggtagatgtgaaatgacatgatgtacataaaactcatcacttactattatattattacaatattttaagagatgtcctgccttcactgaaaactgtccagtgccttcccatctcactcagaatttaaaaaaaaaaatcaaaagcctggttaccgggactgtcgggaaatagggatgaggatatatatatatatatatatattttttttttttttttttttttgagatggagtttcgctcttgttgcccaggctggagtgcaatggcgcaatctcagctcactgcaacctctgcctcccaggttcaagcgattctcctgcctcagcctcccaagtagctgggattacatgcatgcatcaccacacccagctagttttgtatttttagtacagacagggtttctccatgttggtcgggctagtctcgaactcccgacctcaggtgatccactgcctcggcctcccaaagtgctgggattacaggcgtgagccaccacacccagtctattttttaatgggtatacggtttcagtttggggaaaaagaagttctggagatggatggtgctgatgggtgatggttttacaatgatgtgagtatacttaatgccacaaaactgtacatttttaaatggttaaaatggcaattttatgttatgtatattttatcacaaaaaaaagaaaaaaaaatatcaagggccttaccttgacctgctaaggtttgacatgcctggtcccctgctaccacttttagctcctctcctgtcctctccccagctccttgtgcactagccatgctggcctccttattgctcacacgtgcttcagggcctctgcaggtgccagaccttctccctggggggttcttccacccagagcacaactccctccttcacttccttcagtctctaattgaatggtgacttttccaggaggacttcttcggccactattgaaactaggccccggacatcctctaatcctttcccctgccttattacctgacatatatatttgtatgtatgtatcagctatcttacaaactagaatataagctacataacattagggacttctcttttatttaccactgcatccctagggcccagaacaagcctgcgcccataatgttgaataaatatttgttgagcaattcaagtagctcaggtgacattacagatcacacatggtgacctataacacaggcaagcacatagtaccatggagccatggatttttttctaaggaataggatggaggggacaaagctggaggctgttataatagtccaggtaagtaaagaggtggtaggaaatgtgataaaatggtataaaactacacacacacattgaaccaatgtgaatttcctggttttgatactgtgctataattacataggatgcaaccactgggggaagctgggtgaagggcctygctatactatctttgcaatttcctatgaatctataagaatttcaaaattaaaagtttttataaagtgggggagggggtgatagggatggagaggagaagagtcagcaggacttagtgactggcttgatacaaggggttgggatatgactcccaggttttggtcttgggtgacatgatgaatggggggaggagcactaactgaacagtggaaggagcaggccagtttaggcatgagataaagaccaactggggttgggggatgtctttagccaatcttcaggccacaaaatcccttattacctggactgccagggagtaataacaccatcatcagggcccccaatcagcaccaggtggcccacacgcagaaagttcttccgccatactgtaggatgggaagaagagaggctgagtcagccacaggggtcaggccaggttggagagggagacatagggagtcaaagaagcagaaaaagcaacacaggtaggagcctgaattctcacctgtggcattgggatggtctctttccccattgatcagggccaggaagctgctggcattgaggtacaagtcatcgtggtggggatctgggtacaaacagcagttagaaaaagaagcagaaaagggaggcaagactggtggtgaaaagcccaataaggaagctgcagcaatagtcaaggtggatagtaataaaatagtagtgataatgtaggccaggtgcggtggctcacacctgtaatcccagcactttgggaggtagaggcaggtggatcacttgaagtcgggagtttgagaccagcctggctaacatggcgaaaccctgtctctactaaaaatacaaaagttagccaggcgtggtggtgcatgcctgtaatcccagttactcggggcgctggaatcacttgaacccaggaggtggaggttacagtgagccgagactgcaccactgcactccatcctgggagacacagtgagactccatctcaaaataataatagtagtgataacaaccgtaaacatagtaacaagtacttttttttttttagatgaaatctcactccgtcacccaggctgaagtgcagtggcaggatctccgctcactgcaacatctgcctcccgggttcaagcaattctcctgactcagcatcctgagtagctgggattacaagcgtgtgcccacattcagctaaattttttttgtatttttagtagagatggggtttcaccatgttggccaggctggtctcgaacccgacctcaggtgatgcgcccacctccccctgccaagatattgggattacaggtgtgagccaccacacctggcaatagcaagtacttctatctagtatctactatatgagccaggtactattcaaagtacattgcattcatttatttatttaatccttacaaccacctggtgaagtacatgctataatattttacagataaggaaawctgagtaacagaatggttaagtaacttgcccaaaggcacccaatagggtcaagattcaaacccaagtattctggccccatggtctggtctagargttggcaaactgtgaccaaaggaccaaatccagcctgctacttgtttttgtaaatgaagttttactggaacacaggcacattcattcacatatggtacatggctgctttcacactacaacagcagaattgaggagttgtgaaacagactatatgtcctacaaagtcaaaaatatttactctctggccctttatagacaaggtttgctgactcccacatcagactaaaccttctaaggcaataaggtgacacacttaaaacattctgggccaggtgcaatggttcacacctgtaatcccagcactttgggaggccgaggcgagtggatcacctgaggtcaggagttcgagaccagcctggccaacatggcgaaactccatctctacttaaaatacaaaacttagccgggcatgatggcgcctgcctgtaatcccagctactagggggactgaggcaggaggatcacttgaacctgggaggcggaggttgcagtgagccgagatggtgcactgcactccagcctgggcaacagaacaagactccgtctcaaaaaaaaaaaaaattctgaacagagcctgttcaaataactcaataaatgtaagttatctttattgtcatcactgctattggttgtagcagaggtggaagcaactgacctgatccatggaagccccagttcagcatccccactcaccatgccagtagttgcagatggagaattcctggccccaggggctatagcagatccgatagaggttagaccgcatggaggtggggaacagccacttcaagtagtccgtgtctggcaagygaatggcaatgctaagtgaccataaacctctgttcccccaaaactcagggcattctatggagtctagtgcccactcacctccatactgtcccatctgtggagaggagagggagatgaaagaatccacgttgtgatcatccatgacagaaagcagagcccggcacacaaggccccctgtaagcagaacaccacattgggcaggcacttaaggacagcaaagccagcagcaccccccacccccaccacacacacacacacacacacacacacacacacacacagagacacacacagacacacactgtacacaaaggagactgaggcttacagaaggcaggcacaccctgtgccaaaaggtcacacatcatataagtgactgagcccgaattagatgctgggcctcctgcctctagttctaggatgtttttacctgccccattagcccttatgtccaagaaccatgggtaacaggaagcaaaagggcagcagtgtagggagcctccctcccattcaagacagagatgagacccaggtgctgagggaagtcagaaaggaagggctcaggtaccagggttgtgcctggagcaatgtggttcagaaaaagggacgctaggaagtgtccctcagataaggatcaagcctcagatagggcttaggagttaggggcaggggagtcgcctaccctgcgagtagcagatgagatgcaccccttgaggggcctttgccatgatggggaccacagcctctcggaacccttgcacctgttcccacaggggtcgcaagctctctctcccatcgaagagatcgagcactgtcaccacagtcccggggtgtgtctgtgggaagggggcaatgcagccaccggggataggctaagaagctcccacacgccaccccctggcccgcgtccacaggtctattgtaccctgctagaaccagggatcccgtcccccaactctcccccacgccagcaccagctccctgaggaactgggcaggcccagaggggtggctttcagttccccgctctccctcccctgccacagtagacgcctctaacgccctgcacccaggtgtcccctgccagacctcattgatgtattccagcaggtggcggaagctgtacgagctgtcgaagagcccatgcaccacgatgaccggcttgtaggackcgcggtggggcgcgggggctgcaagcagcagcagcggcaggaaaggcaacagaagcaggacccacgccgcggggagccgctgcccscagagccccagcatgctcccgcctgagaaaggggtgataagggcatgtgagggagatggcaacaccctcctccctcggaacagacgcccggcaatcaagccacctcctctcgctcccacaccaggtccgtgtcacaaaatagcctacttttaacttactccagccctctccctacaaacacacccccccaccacgttgacgcaccaacgcgcacccgaagtcccgcctccaactcagcgttcgggggacttgttctctaggtccaggatcttcctaatgcatcgcctcagccatgaacaacgcggagttctttaatacccgtgagcagcagcccaggccccttgaagagtgcagactcccacctggcctgggtccgtaggcctcgctccacccgctgtttacttatcccaagtctggaacccacggtggcggggggaagggtgaggaaagagarcgcaggggaatgacggatgggagggggaagggcgggctgcttggggtcgcgcaaatccgtcacgtccggggctttctctggcaaccgcgcgagcgttccccgcaacacagacccaggacaggaggggcaatggaatattccattgcgccctaggtgctggggaggaaacaggcggagcgatccatttaggccagtggggagaggaaaaagcagcaaacatattctgggaatggaaagaaggcctctccaggcttcgttgcccccagcgacccraaagtccgatttccccgccttgattctccccacttcccaatacaggmgtctggctccgcagcagracacgaagtttgcattccccaaggggcggccagggggcggaccagggaaaggtagtcctctgcattttgccgtgtgctgggtgagtggcagggtggcctggagggctgatgccagcccgggcgtgcccctcaacacccaccccaccccaccctccagtccgccccaggtcagcgacttacaactcttcattctgaagtgcgtgtagtgcccttgtctccagagacgcagagagtcctcgaggccccttgagctaagtgcagcctggcccagtttctcctgccctactctactcccctccctataagcgacccaccctcaaggggcggagggcgcgtagggatgcgctgactcatgcccgcgtaatttcgaccagtctttcaacctgaacgacccccagaatctggctgtctgagttatctgtgggtggctccctaccgaaacccccaggcgccccacctctccgcctgtgacccctaaccgacaccctagtgcctcagggcttttacttgctagggcttttacttagcatttaaagacgtttctctagagataaggatttctcagcatgtctgagcccctctctctgtttacaaggtcattgcttggtctaaatttgtctcaatcaaaacatttttgcgctcagaatggtgtagagtgacgatgaggtggcggtaaggggttgagcgctcacgcgaacgcctaagtgaccagaacgactggtgtgaagccgtgatctgactctgtggagcctgggactggtttcagcgagagcctctgtactgctctgtagtctctgctaggacatggacgaaaagggacgcagccgggagagcgactgccccaggtgggggctggggggacgtaagggaagaatwatrattatctggctgtgtttttgtttaaaaaaaaaaaaaaactggtgtaaatctccatagacttcctatcctcgctcccttcacccacccacgcgctcccaagatgcaataagcaaataaaaagactaataacgctgtactgcaggtcgactcaggagctggagatgcgtcttggtgggaggtggtgggtgggagtaggggggtttagggaatggatctgaacattgaccagcccagagactctaagcagcctcaaaagcaaagggaaagtgggggaacaagcacacattaccaacagagctgccagaaatgagcagttaagtcataccccctaccccctccaaaagagcttcagctccttagtcctggacgaagaaggtatgtatgcacaccgcccaaactctctctcccttttccctccaaggcccagctccccctgatttacagacctgggcctccctctttactgctaggttggtaggttcaccaaaccctgggaacttttcagaccatcgcagttctgaactctgcacaattctctctcacacacaagtatttatctcttctaaagaggaggaaactggggccaaggatttgggagaagaccctggcaccttgcagggagctaagagggggagacgacctgcctctggaggcacctgggttattaactccactgagaacctgttcacttcctcccacaatacaatcactgagtcttggtgggggagactccagagagttctccttccttcctttccttagtcccacccgcctcgcctggtctagcctccgtgtttccatgacaactccaaaggagcccaaactgggggcttgaatgccggggtaagaggaggagagaggtggtccgagagcagagagagaccgagtgggaaacatctgaagcgctccccctccctcgcctcggtccctttaagctccccccctccccgctctccctccgcccgccccccccgccccccccccccgccgctgccttcatctctccatctctgcgctgctgccgctgcgccatccagcacccagactccagcaccggccgaggacccccactccggctgcagggaccctgtcccagcgagaccgcaggcatgtcatccgaaaagtcaggtaaaaacaataacaaaacctcccaccccctccactgtctccagactctccgtcccccttgccccaaccccctcccttacccctcctcagctgtggttctatttcattccccttctctccagctctcaacactcccccagtccccctcctctttctgtctccccctttctcttcctttcctctttccagtggcagcctctgccccttgccaacaacatggtcaggggggtaggttgagagggtgaaggaggtacagccaggttttgcagggatggcatcattgggagtgacagatggacaatcactggctggcatggagacatcctgtgaggaaatatggagacatgaccagatgggggttgtcaagggagcaaaatccagagggctcttcttaatctgccctaaaasaggtcccgagattctcacagaggctggggcactcctccccccactgaaggaacagcagagtggaacacatgtcatcccacatgtgtttatacaactgttgaattgagcacatattaacacagggttgcatgtctacgcatacgcacacacaggactagctcggataggccagcccaaaggcagctatagcaaaggagaggggattaggtctgcaggtgagagctgggtgcatggtgatgaaaaagacagaaaagaagcagaccagagttgtgacctcaaaactagattggaaggaagaaggaggggggcagatggcctakatacagcccctctcttgcccctcaaattagagatggtttctcacccgtctctctctatgtgtctctcccattatctttctccatccctgaccggctgtgtttccccttaccccctcctcaactcatcactgtgtcatctttcctcttatactctcctccactcacctcccccaggactcccagactcagtccctcacacttctccgccgccctacaatgcccctcagcctccagccgaacccccagccccaccgccacaggcagccccttcctcacaccatcaccaccaccaccactaccatcagtctggcaccgccaccctcccgcgcttaggggcagggggcctggcctcttccgcggccaccgctcagcgcggtccctcctcctctgccacgctgccgaggcccccccaccacgcccctcccggccctgctgccggggcacccccacccggctgcgctaccttgccccgcatgccacccgacccttacctgcaggagactcgcttcgagggcccacttcccccgccgccgcccgctgccgccgccccgcccccgccggcgccagcccagactgcccaggcccctggcttcgtggtgcccacgcacgcggggactgtgggcacgctgccgctggggggytacgtagcgcccggataccccctgcagctgcagccttgcactgcttacgtgccggtctacccggtgggcacggtgagtgccgggcagacagggacatgggaaagagggggacgcgatacaggacttgaaattggggatacgctgggggctggtaggatagaggaacaagggcagggaacaggtagtgttcccgggacaagccctagaaagaagggagcctgagacaggaaggactagggagagacacgggagtaggagtctactggtgcccagagtcagggcctgggagggggatcggagcctagaggttcagaggaggtctgaaagtaggaaaccgcctggcgggggacggggggaatggaagctgggaaccaagagggatgtgggagaagcctgggactaagggggtaggggaggcctggtaggtgtctggagggaagaaagaaggtctgacctgaggccaggacagccccagtgggaccataccttgcgggagagaatgtagaaagcccaagaatatggtggttaatgaagcaaggaagggaggagaggggcttargtggaatttatgggtgtcctggaagggtaatgggtgctttattttgagaagccataggtaaaaattgtgcttttaaagccactctgccagccgcccaacgctggtaggctgggagagggtcagagtgatgcccctgccccccaaatttccttccacagccatatgcaggcgggaccccggggggaacaggagtgacctccactctccccccgccgccccagggcccagggctggccctactggagccgaggcgcccgccacacgactacatgcccatcgcggtgctgaccaccatctgttgcttctggcctactggcatcattgccatcttcaaggccgtgcaggtagggggcaggggcatactcggtttgggggcggggacagggagttctgggcgttctggggaccatcttagagaaaggctgaggcgttcgaacgaggccgcagctctttgacctccttcccccacccctcctccgtaggtgcgcacggccttggcccgcggagacatggtgtcggccgagatcgcttcacgcgaggcccggaacttctccttcatctccctggccgtgggcatcgcggccatggtgctctgtaccatcctcaccgtagtcatcatcatcgccgcgcagcaccacgagaactactgggatccctaaaaacgcccctggtccggccccactctgcgcccctcgatctcccaggctctttctgcagtcataccgcggacccaatgggcgccctgcacacccgtttctggggccgtcagacttggatacatcgtaaactccgcctccacggaacgtctcgccttgcgagcaagctcggaatccagttcctcaggaacccctccaaaacccacacccccagggacgccgctttccgggatcccggccaaacgccggaccctcagtcgctccaggccccctcaccctcaaagtgtagcgcccccaaccgagcaacctcggtttggtccctaaaaccccgcctcctctataagcaccgccccagctctgacaaaaccccgcctccaggtcggcaggctccgccttcttttcttctccgcggggtgattcagtccagtgattgggtttgtggctccaggcctcgcccacagacggacagacccctccctttcttccggcaaaaggaccgagccctggggtagtaaggcccccacactcctgttttttgcaagtacatttttgtccctcctccacccaggtatctgcctattttcttgctaatcccagaacctttccttttgctttttttaaggacatttgggaagttcctggtgtaggacccttctccctgggataagaaacctgcctgtaaacgctctgtaaatactcccttccacccatcccagcccctgggcagccgggcagaagggaatccaggctatggacctcccaagtccccgctccccgctcccctcggcggccccgccttgttctgatctgtgtgtgagtgtgtgtgaacttctgaaagacaatattaaagagacttagttgatttatcgcccgcaattccaaagactgcggccccgcaaagaccctccccacttttgattccgcctttcacttcccttcatctcctcttccaaggaaaaaaaaagaaaacccgacagagactaacgtgagggacacagattcccagatcgccagagagacacgtgaatatgggggacggaggggagctccctgggaatccaccaaggaagaccttggggtccattctcagtgaggctttattttcttagtgaggctttatttccccagtaccccttttccattccctactatccccagaactccaggaagacaagagaacagagagggcagaccatggtgaagaagctggtcaaggatagagtgatgggggccaagaagagatgccagctgcccatagctgttcctgactgtgggctggagggtggcagataacttggattagagccccacatgctggactgtagggggtataggaaaggcaaagagagcagattgctgtgggagcccagggaggaggtcaatggcctctcaagtctccctgggactagttgccctctcctatcctgaggtcaaccaataggcctcttttctgaggggagtggtgattaggggatgctgccagcagtgggcttgggtctttggttgtacacccacaggacagggtcctaacctaatttatgcatttatgcaacatgcagactccatgctggatgctggtgagacatccacccagacagcaggtgtgacccctgacctcatggagcttacaatctagaagggaagccatgcactgagataggaaatgtgataggagatgtgggaggagggtggggtgaggtgtgaatatcatgggttcgcccttggatgtttcgcatttaatgtgcctaccttaccaaacttcttgaaaaacagaattcacggctgggcacggtggctaacacctgtaattccagcactttgggaggccaaggcaggcggatcacttgaggtcaggagttcgggaccagcctggccaacatggtgaaaccccatctgtactaaaaataataaattagccgggcatggtgacgggcacctgcagtcccagctacttggaaggctgaggcaggagaatcgcttgaacttgggaggcggaggttgcagtgagccaagatcaagtcattgcactccagcctgggcaacaagagcgaaactccatctcaaaaaaaaaggggcaggggggtgcggaatattgctatcagagatatgtctgtatctgtctttttttcatacccactatttcttgacttattggaatatgcatccacaccctattctcctgaaacctccctctcaaatggcaaccaattacccagatcccaaatcaatggcattttcacagtattctgcctctctaagccctcccatgtttgtcccttgaccctgaattccccacatacccaggttcaagaacgtattacctcccttcccccgacacacacacagacctctaaccattccgcctctgccttccctccttgctttttctcctcccttcccctaagtgtccatctctgattttttttccttctctgagactttcctttgaaaagctcattcactcaactcagctaatcaaatgcttttccaacctgtattttacatgcagacgttttttccagtgcctgaagatcatagccacatggaagatgcttgctggtcctctaaaatcaacacattccaaaacaaactgatgaaatgccacagaaaacctgcttccctgtctctgttaatagaccattttcccaatcactcttccttatctagaaatttgccgcctcctccctctccctcctgccttatttttggtgtgctctcaagcctagtcagttctgccaccacaatgtcttttgaatctgtaatttttccccagcccttgctggaaaaattacctcattaggattattgcatcagctttcccaacaggtctccctacttcctacttctccctacctcaagtctccctccacactattgtcagatcagcctccctaaacacactttcataactccactgctcaaaagcccttcaaggttccctattgcctactcaattatttacaaaattttaatctggcctttaacaccttccataatttaaaatcatccagcttctctgttcattctaatttctaaccatactgaattactcatcattcccacctccaggtatttgcccagctgttcccaaatcttagacctccttcccaaatctctgcctattataaaccaaattgtttgcagcttgtcacaaatttcagaggctttagaccacatctaggctcttgctcatgatgttctccccctcttgacatctgcctctctacttggtcaaattttatttacaatatctttcaaagtccggatcaattcatccctcactgtagcaaaaaggtgtctctctttcctctgggttagattaaagcagtgggtttccaaacagagcttcaggcattccttggagcaacggttcttaccccaggttacacattagaatccactggggagcactgaaaaatctgaaagcccatgtcgcatcctaaaacaattaaatcagaatctctgggctcagtgccagtggctcacacctgtaatctcagcactctgggaagtcgaggcaggaggatcgtttaagcccaggagttcgagactagcctgggcaatatggtgagaccccatctctacaagaaagtttaaaaactagcctaggccagatcgagaccatcctggctaacatggtgaaaccgcgtctctactaaaaatacaaaaaaattagctgggtgtggtggcaggtgcctgtagtcccagctactcaggaggctgaggcaggagaacggcatgaacccgggaggtggagcttgcagtgagccgagatcgtgccatgcactccagcctgggcaacagagcgagactccgtctcaaaaaaaaaaaaaaaaaaaaaaaattagcctaggccgagcgcggtggctcacacatataatctcagcactttgggaggccgaggtgggtggatcacctgaggtcaggcgttcaagaccagcctggccaacgtggtgaaaccccgtctccactaaaactgcaaaaatcagccgggtatggtggcacatgcctgtaatcccagctactcaggaggctgaggcagaagaatcgcttgaacctaggaggcggaggttgcagtgagcccagattgcaccactgcactccagcctgggtggcagagaggcactcagtctcaaaaagaaaaagaaaaaaaaaatttagccgagccccatggctcacctgtagtcttagctacttgggagggtgagacgggaggattgcttgggcctgaggggcagaggcttcagtgatcagaacacggtgctccagcctgggcaacagagtgagaccctatctcaaaacaaacaaaaaagaatctctgggggtggaactctggcatcagtatttaagacataaccaggtgattccaaagggcagccaaggttgggaatcacaggtttacagacactttaaggaccacccagggagaatggaaaggccaaaaaatgacttcaacccgggcaattttctttaggagaaaagtatctagatctaagattcatgttatctgcatattttctcatctcttcccacctgatatcttgacatacacagtttaccttgtgagctacttgaaggcaagagtcaaatctggcttatctctgtttttcagatcctcatcagataaaacctcctctaccaatctttgaactcaattgaattgaaaggaatcaggcaaagggagagatgaataaaaaatgacttagctttcttttgcttttccttaggaatgtttgtttcttaatctcagatctcttaacctcacccagactcctccctcatgaggaaataaaatgttacaatgtgtggccgggcgcggtggctcactcctgtaatcctagcactttgggaggccgagatgggcggatcacgaggtcaggagatcaggaccatcctggctaacacggtgaaaccccatttccactaaaaatacaaaaaattagctgggtgtggtggcaggcacctgtagtcccagccacttgggaggctgaggcaagagaatggtgtgaatcccggaggcagagcttgcagtgagccgagattgtgccactgcactccagcctgggcaacagggcgagactccgtctcaaaaaaaaaaaaaagttacaatgtgatcctcttcctatctgactcacctccctctgcaggtgatacccttggctgtggcacctctactgacagagactccatcctctaggagaggctctgccctcccataacatctgtatgggtgctctcatacagatgggggaaaaccatgattagattctgggtcatcattccccctctacaatggaagattcagcacctgatcactctacttccaccgctcatttcattttcttctttttattatttatttatttatttttgagatggagttttgctcttctcgcccaggctggagtgcagtggcgcaatctcgtctcactgcaacctccgcctcctgagttcaatagattctcctgcctcagccttagtaggtgtgattacaggcatctgccaccacgcccagctaatttttgtatttttactagagacagggtttcaccatgttggccaggctggtcttgaactcctgatcttaggttatctgcctacctcggcctcccaaagtgctgggattacacacgtgagccaccgagcccagcctctttttcttttttcttttttttctgaggcagggtctcgctctgtcacccaggctggagtgcagcagcaggatcatagctcactgagcttcgatctcccggtctcaagtgatcctcccagctaattttttttatttttattttattttttttttttgagatggagtctggctctgtcgcccagactggagtgcagtggcacaatctcagctcactgcaaccttgcctcctggattcaagcaattctctgcctcagcctctgagtagctaggattacaggcgcctgccaccacgcccggataaattttgggtttttttttttttttttttgagacagagtctcaccctgtcgcctagcctggagtgcagtggtgcaatctcggctcactgcaagctctgcctcccgggttcatgccattctcccgcctcccacctcagcctcccaagtagctgggactacaggcacccgccaccatgcccagttaattttgtttttgtatttttagtagagacggggtttcaccgtgttagccaggatggtctcaatctcctgacctggtgatccgccctcctcaccctcccaaagtgctaggattacaggcttgaggcaccgcccctggcctgtttttttgttcgtttgtttttgttttttttggacggaattttgctcttgttgcccaagctggagtgcaatggtgccatctcagctcactgcaacctctgcctcccaggttcaagcgattctcctgcctcagcctcctgagtagctcggattaccggcgtgtgccaccatgcccggctaattttttgtatttttagtagaaatggggtttcaccatattggtcaggctggtctcaaactcttgacctcgtgatccacccgcctcggccttccaaagtgctgggattacaggcataaaccactgcgcctggcctctggcctttgatatttaatagagatgaggtcacactgtgttgcccaggacagtctcgaactcctgaattcacacaatctgcctgcctcagcctcccaaagtgccgggattataggcatgagctacagtgcctggccccgttttattatttttgttttcaatgttcatgcagattctctagcaccctgcccttctcttgcagtgatttatttctccctgcttccctctcgccctatgtcataccttcaacttggttgccaccaatacctactgcccttctaaaatct

SEQ ID NO: 94489 - DNA, 80239 bp, Homo sapiens
  misc_feature (1)...(80239): n = A,T,C or G
ttggagctagttactgggagtaagggagggtggggtgggggggagttcaggtttatgtgtgtgcatttcttttttattattattaaataaacaacttggagggagttgaaggaatggtggctgccttcctggctcgtgatggggagtttgggggaaagtggcttttccagagccagcatcaaagaatcaagcactgaagacatagctggctctgaggtggggtgggtgcgggatcacagaccgcatgtcatccccttgcccccacccctgcaactctggggtatatctgtgtctagcaacgatgtctcatggcgtgacagactagaggatacgcatccctggaatgtgagtcaacaggaaagatggggccccacgcccttcagggtgagcagcctctgggtctcctgctctcgagcaggttctccccctcttcttgctgtccaggatgagcagctcaaacaaacaacaagagctggggccagaggctcagagcccaggaagtgggggtctcggtgaagaaggggtgatatttggaagggaagggggatgtggcaggatatcctctaagccctaaactggaggggactgagacttgagagtccagatgaaagacaaagacaagagtggggcaggcagaaaaagctgtacattcttatgtttttaattttttttttttttttgagacggagtcttgctctctcacccaggctggagtgcagtggcgcgatcttggctcactgcaacctccgcctcttgggttcaagtgattcttctgcctcagcctctcaagtagctgggactacaggtgcacgccaccacacccggctaatttttgtatttttaatagagatagggtttcaccatattggccaggctgcccacttcggcctcccaaagtgctgggattacaggtgtgagccaccatgcctggctaggctgtgcattctaattaggaggaaggggagcaggacaaagtgagggattgagtctgaggccaacctggaagaatccccctccagctgctcctgttcagcagtgcctcaggcctgaccctgcaggagtgtcctgggtcagctggagggtgtgagctgggcctgggctcaatgcccagatgactggacaggggctgcctgggccataagcccaggcctgaaggagggaggaagaacctcatgtgtccagccaggcaacccccacacccctcccactgccctcacccattactgtgtttggggtgaaaacagaccaagtaactatggcaacctggaaccagggatcccaggaactagacctttcctccctccagagggcagcccagcttctcagctatgctttctatcccagagtccttgagccttatccaccgtatctctggagggggtgcagtgagaacaaggattttggaagcacatcacctaagctggattccctaccctgcctttcgttagtagatgtccttaaacattctgagccttagtttgcttatctgtaagatgggatgttcctacctcctaatcagggttgatgacaggatgaaagacgacgtcctcagtgcctggtccataatagatacaccttttcctcatcccttgcccctttctgtccccatctctgttgtccttctctcttccacttttatcccatttgggttcattactgtttcgttgtcccattgtcttcctccttcctgcccccagttcgggaaagtacttgaagtgctggcatctcaggggtcaccctggggtgggacatcctgctcctctgctgattggcaagggacagctggcactttggtgtggatgagacatcagacctctcttggctgagggattgtggtggcaggaaggattgagaaggacggtgagtgggtacctgatgcagggtgaaagccgggcaggctctgggctgctgccttctaggcccatgtggatctccattcctctggccacacccccaaggccactcagcatgccaggtcgctgtcactcctgcacctcattggcccctcctgccctatgcccactttgtctttctgttctgctttccttgtgccaccatctccttcatttcttcctcaggatcccaccttttgttctctctcatccctgacctcatcatccctcccttcctctttctagacttctttcctgcctttctttgctctctacctcattagcagttatcacaacctctttttgaaccattattcatcactgtttttttcttcttttgtatcttccccaccccatccactgcttcactgtcttaaattttttttttaatttaaaaatagaagtggggtctcgctatgttacccaggctggtcttgaactcctggcctcaagcagtcctcccatgttggcctcccaaagtgctaggattacaggcatgagccaccgtgctggccttatttaaaaatatatatatatttttaaattcactgtctttttcctttgtttttcttggtcttctcatctgctgctgctgctgaccctgtgcttgtctcctccctttctcatgccgccccctttctatttcccattctgctccctcgtccacatttcttgcccctttccattatgtcctctcttttcccccactttggtcctctcctcctccttccttcccccactccctttacttcccacaccagttctccatcctcttcccagctgtgggggccagcactggggagcctgatgtttgcctcatcgttctgctatggcttctggatacagcacatctggattccggggcccagatgtgtggttrccacagcgacctgggtccctctggtaaatacaggcgcccacccgcctcagagcagagaacaaaacaattgtgtgactttcttttgtcacgagatagaaatgtccttcctcctcccttctccccacacccatgtctctaggcaaaggaagttttaagggtccaaacccttccttctgaggctcccttgcccccttttcagctgtagcctcttagttctctcccatctttcatcctgcgctctgtctttacattctgtgttccccatcctcacccgacccccagttctcaataatggaatgttgaccacccccttccccatctgatgccatttcttctaagtgaatctacacaataactggatgcagaaaagtttcaaaaatctggattctccacccttctttgtacaagtgcttcaaagaagccacttcatttgttccctaagtcttcaatcctttcctttcctggagttgtttggggagaagagcgaatacaggcttaggaatgagaacacctgggtgagacccaccttcaccactactgacttagccccttgaacaagacccttaatgtctatgagcctccgtttcctcagccacaaagtgggattaatgcccgcactgtgtaggaaactgttttgtaaacggaagcccggcacaagtgttttctatctttcccctctctgggactgctttcttggaccgcagcccctggcatctcttgttcccctgtcttcatccttcaggtccttgccctcaattgcccttactcttatgtgtctgccttctctcctccctatctttcctttccttttctctatctttcatcccttttcctcctgaggtcaggacaggaacttggaggatcattcaaggagggaggctcagagctgaagacacagggactgaggttacagagaacagccggagcttgtggacagttctggacaacactgacctttctacccaccaccacccagacacctcagtgaagccaaccccagctctgaccactgggcttccctgccttcacgcctgggctccttaccctttccccctcctctctcccagtcctttcacatttcagtgttgacttgcatttattggtcacctacactgtgcaaggcttggtgcttttcttacaagatgtgaacatacaagacatgagcttctccatgagcctggaaaccaaagggtgaatcaaatggtaaacaaagataatttcagaacctgaaactatatctgctaagcttccagtggcttccccaaatgccttataagcttgtgtacatctggaatcccacatttctctctgagaccccaacagtgggcttccagaacatcccaggaccatccttcttgctgtcttctctgaggtccctggccactctctgtgccaaatgtacttatgttgaccattcttcctaaataataaagccaggacatagggcataggcacacgcgcgtgcacacacacactaaaggatatgaccatggaacagaaatctgaaggtgtcagaggaaattcataccctgtgttctgccctctgtgtgatactgtctccagaccctccctcttcctatcactgcagggctccccacctcctgccaggagatccttgggaagctgctacctactgctggctctgggggcttcaggccaaggcagaggaaggaagctgagcctggctctgtccaagatgctgacttcatcctccccatcaaagccaggaaaaaaacagccacacacacccagacacacggacacacacggggacacccacgcaaaagcccatgtgtgcctttgccctcggccacatggagcttactgggcatctggccacagccacatgcagtgcaggcacgccctgacccaggaacaccacacacctgccaccatggggatctgacctggtgtgcagacacctgggccgtcacccatgtggcagaatcaagcacatatgggctccctcacgtacctttcacccgtgacttggccaagttacacctcagtggtgaggtctgtagcaggatagagagacccagtcctcactgtgaagctgggggtagtgggttcccactcagctgggatatttctcctctgtagcaaagtctctttttcagctccttgtcagggcagcacatggggagatgaagctagggaaacacccaacagacttatgtggggtgtgtctgtctccctgtcccccctgtcctctggctgtcagtcttctgcctgggaccagagacagcgtgtccgtttcctccagcccctacctctccccgcctctgttcctgctcccccgcagcacccaggcaccagccccccaccctgctttccaccacttcaccctctattcaggtgacccacccttatatttgcctcctgtctctagccctttcttcaaccctaaaccttcctcctaaccttcaggctttccttccttgtccgccccaaccccagcttcctccccaaggcttgtatgtcccagtgttcacccaagcccttgccctgccagtgcccaagcctcacctgctctttctctagggacttgctgaggtaggagaatgcaaagggggcagtgacaggagagggactgaacagaacagacagcaggagtggctcggggacgggataagccgagaagatagaaatggtgggactggagcagggtggggacttggggtcccagagacggtcccagttggagaaagaggttgcctcttgcctcctgccctctgcccctgctccctgccccagactgccaggggagaactggtgagaggatgagggagccagcactgggtgatagacatggggtgcgatccagagatccaagctagagcagtggctgggaagagatgggagaggagcatgggggagggaggggaagggggctggccatgaggaaggatataggctgagaggaaaccactggggtcagagaggaggggcagcaggtggagaaatggtggggaaaaaagaaatggcaggaagggtgggggrtgtcaagttgggcaaaaattagggtgagctaaaaatggcatagggaaaggacgtgggaggtaagaccggggctgggggttgagatgagggtatggtgagacagtgatgctagacagggagtgggggctggggtgggggcaggagaagaggaggggtggcatgtggkagggcctgggaggggtgggaggacctgccctatctccgctcccctccctgacctcatcctggtcctccccttctcctcccctgctcgctgcagactccctcctcactgtcgctgccgagatccacagtcggttgtggctcagcccctgttgcaggggacaagtgagggagacttccctgtcctgccctgagacgccgccctcccggggttggggacagagcaggtgcagaggcactgcagctgctcggttgcccaggtaaggaacagagttctggggagacccagaaggagaggcaagggatttctcgcctatccccatgccccaggtgaaggtgtggcaggtgagctctcagcagtgcttccagagcaaggacttctgttcaggacagaggacataggagcattcgctgggaaccaggctccctgtgaaggagtgtctgggaggagagggtggtatgtgtgtgttggggtgggcagtatgtgtcagggtttggatgggatgcagacaactgagaggggctgggaacaaaccgagggactccgggagtcagatggtggaaccagggtagaggtggttattggtgaggtgagcccctgggccctggaggtgctggggctagcgggaagataggamtaggctgaactggtggccagctgaaccttggaaggaaagtgcttgcggaatcccaaatgtcgggctagagcagctgagccyaggctctgggggctccaggctccaggaggtgccagagggtgcttctttgggcatccaaatggggactccctaggtggcagcgtgagagttgcagggagggaggtctgggagatctctttaggaaatactgaaatgggacagtcaggactcgggtctgggacgtgcacagagcctgcagagaggatcctaaaacttgttcttggccagagctctgcactcatgactcacggttcagcagggctgggatggmtgagagatgcctctgggggcacaggggctccgtcttcactctgtgccccttccaggctccccttgcctctgtctgtctgaacccgcactctccctcacctcgccgcccccgccccccaccaccagtacacgtgacacgccccgggtgggaagggcgggccccttatctcgcctggaaagaatttaatggcatagaaacaactggaagtggaactgagaggaactactgggaagcaactcggaaacaccacagctgctgcctgccctgcccctgcttcccgcatctccagcccctcctcttttccctgaccctgccttcaagtccctggggacccagcacctcaattcctcaaacttcctttgctcactccagacctagccactaggtgcaggaccagaaactgccttcctgtytctcattgcacccctaaccattttcagctggggcctggaaatcctttctcttaatttttccattcccaggccgattagctccccagaataaggggtatctggattccccaacctacccctccctgacacctccttcctacctggttccagcccaatatctgagacccccacattccctttttagtctcactcctagaatccttctaccttcacctctcattgccagattcaactgagggtgtagcaggagggtcagagggaggcatgggggcrggaccagaacccccatctgtggaacatcttttatggaagccagcccctctccccaccccttgggacctatacagtccctaatgagcaaagtgtcaaagttggctacaacacaaaatacccaggaagctgagtcacagtttgggaagatgcccccatccctgccagccctccaactgtggggagggtgccaagagggtgaggccatatctctctccaaacacacactacagagaaccaccccagacatagtggcagggggaatggtgaaggggagacacaagagacacccaattctttgcttgcccagtaccgagagaagagcagaattatcccaggagctggaatggggagctggagggctgggtggtggcaacagggcagggagggagattgggaaggagcctctgggtgtgtggtcaatggaggctgctctgctcttctagaccaatctcaccagctttccagaaaagctggtgagctctcttcactccttcctggtgcaaagaccctctctgctttcccccactgtgcagggaaagatgaggaatccacttatttggggaggggcactggacaactcacagaggcctccaggggtacggggaagtatggtggaggccatgtgtccgctgcttcccactgggaagggcctcctgctttgttcctctcacaccatccaggttctttcactcacagagctgccctcggagccaacaagaaatcagccttcttaggcatcacccaatgactaggtgtggrggaaacctgaaggggagattgggtgtgtgtgcacgtgtgtgcatgggcacccatatgtgtacctacaaggatgcaggttttgggggtggatttgtgtgtctgtgcaggtatgtttgtacttgtggatgagcacacattaatatatttgtaagtgtacatgtgtacacatctttgtgcaagcattcccagggtgtgggagtgattagcatggccttagacacaaagtgacaggatttgagggtcggtcagagcccatctcttacccaaggctacactccaggctgasagaagggctggggagacaggaaagggcagctctctgtatgccaggcctctcggcctgggctttcttgggtggggagcctcttggtgtggaaacactctgtccctgttcagctccctttccgtctcttgctggctggtagcagaatgtgatggctggtagccccaattactcctttttctctgatccaggagaaaagtttaagagtagaaagccagaagatgtgtgcgtgttgggtggaggtgtgtgtgtgtcacagtcacctccgcctaccagtgacacatcccccactcctcaccggtcagcatttccacacccaccctgccctcctcctttccccagcctctggtctggaagagctgggcacctttcaacatctctcctcaactcttcaccctagctgaatcctgactggccccctcacactcaggtttgccatagccctgtctcctgtcttatcctgggacccccctaccacctttcctcccacctcttgtctctgtgtgctccccaatccctgcctcagtaaactccacaaacacatacaactgggtaaccgtcatccagatcaagaaacaagacacctttagcaccccagaagccccccsccccatgcccctactagtcactaccccctcaagagtatcacacttctgacttggagcactacagattaatgttgcctctcctcaaacttcacataaatagaactgtgcagcatgctctttcctgtgtctggcttttgttcaacatcatcttagtaagatccatcacactactgcatataactatagttcattcctgctttattttattccacggtgtgaataaaccacaatttatttattctactgatgtgaaatgtttgagtagttcccagtttggggctattatgagctatgttgggtatattcctaggagtggaattgcggggtcatagggtttgcatgtgttcacctttagtacatttagtagattctgtcaaacagttttccaaagtgcttgtaccatctggtcctgccaggatcttccctggcctggcctctgattctgcctcagccctggtggctgtgtctaaccaacttccagtcccagacactgtccgtggtcctagccctgaccttggtcctgcccttggttccagccttaatgctagtcctgcgtttacattgaacttttcattcattcatatagtcggtaaatatttattgagcaccagttatgtgccagatgcagggatacagcagccaagaaaaaaaaataggtgccatgcctgccctcatggactttatagtctagtgggcaagaaagtaataaaataatctcacagtatatttattattactttggacttcaaaaaaatatttgtttatatatgattgcaaattgttataaacgctacacatgagaatggcatgatgctgtgatatcacatgataggaggacctgacctggtcaggaaaacttccctgtgaaaaaaatggcgggctgagacctgaaggatgagaaggccaagagagaagggaacagtgttccacacggatggaacagagtatacaaagatctggggttggggatggrcacagagagtatgagggacttgaaggtcagtggagctggaatggagggagggagggaaatgttatgggtggtgaagtgggagcaggggatacatgatggtagggctgtttgtcagtgttctaagagaatttggaagggagacactgaagcattttgaggatagggacatcctgattgcgtttgtgagactgtagagggcaagagtggaagcagagggaagggtcagggctggacacagtggctcacgcctgtaatcccagcacattgggaggctagggtgggaggattgcttgagtccaagagttcaaggccagcccgagcaacatagaaagatcctgtctttgcaaaaaaaattaaaaattagctgagcgtgatggcacacacctgtagtcccaactactcaggaggctgaggtgggaggattgcttgagcaacaggaggtcaatgctgcagcgagctatgatcgcaccactgcacaccagcctaggtgacagagtgagaccctgtctcaaaaaaaaagaaaaaaaaagcagccaggaggcaattgcagttgtcaggcaagaggcggatggaagcttggattagaatgaaggtaagtgggagagaaggaaatgaattaaagagatgtttatgagaaaatacaggtagatacaaggaaatatggtagccttgaatgggctattaggtttctggcttgtaaagctggatgaatggtggggtcctgagctkcaatggggaattctgggaggggatgggatacaggaaggtgaccgtgagttcaggttacaggcatggtgaatttgaggtgcccaagtggagatgccaagtaggcaggtggatatattgctgtggagcgagaggaagatgactggggtgttttacaaattggtgtatagtttggaaattgaagttataagtctggatgaaggtaccaggtggatgactagagcagtaggtctattaatttagtagaaatttgttgcacattacaatcatctggggagcttttaaaaatactgagtaaaattcacttacttggtcgttctrgtcacatctcaagtgttgcagagcctcatatccctcctggctaccatattggtcagcgtggatacagaatgttttaaaagagaagggccaggtgtggtggctcatgcctgtaaccccagcactttgggaggccgaggtgggcagatcacctgagctgaggagctcaagaccagcctggtcaagatggtgaaacctcgtctctactaaaaataaaaaattagctaggtgtggtagcgggtgcctgtagtcccagctactcgggaggctgaggcaggagaatcacttgaaccccaggaggcagaggttgcattgagccaagatcgtgccactgcactccagcctgggcgacagagtgagactccatctcaaaaaaaaaaaaaaaaaaaaagatgcggtgaactgtgtctagtgattttgagagaagtcaaaggtcaagcaagatgaagacaaatgtcccttagattttgtggcaccgaagtcattgggaagccctagagggagctgtttggtgggttggagggagtagagtggattgaggcatgcataggctataaggaaatgtaaacatcaaatacaaataaattttgacaactgtggccatgaagtagaggagagaaatatgtggtggctggagsgggtgtgagattggggataggttttttaaggtttcatttttttttttttttgagatggagtctcgctctgttgcccaggctggagtgcagtggcacaatctcaactcactgcaacctttgcctcccaggttcaagcgattctcccgcctcagcctcccaagtagctgggattacaggcacctgccaccatgcccagctaatttttttttattttttatttttagtagagacggggtttcaccatgatcgccaggctggttttgaactcctgacctcaagtgatccgcctaccttggcctcccaaagtactgagattacaggcatgagccaccacacccagccatggttcaatttttatacagcaaaatgccaaagtcttaagtgtgcagctcaatgagtttttgaatatgtatatatctrtgtaaccacccagattaagatacaaaatatttccagaaatatgactccttccggtcaataatccctacaagtaatctgatcctatcttctaaaagcaaagattaactctgcctgtttttgtttgtttttttgtttgttttttgacatagagtcttgatctgttgccaggctggagtgcagtggcattatcttggttcactgcaacctccgcctctgggattcaagcaattcttttgccttagcctcccaggtagctgggactacaggtgtgtgccaccatgcccagctaatttttgtatttttagtagagacagggtttcaccgtgttggccaggatggtctcsatctcttgacctcgtgatccgcccgcctcggcttcccaaagtgccgggattacaggcatgagccactgcacccagcctctgcctgtttttgaacctcatataaacggcattattcagagtgttttcttttttcttttttctttttttggtagctcaggaagggtatataagagtataagagcattctctttctgtgtgtgatattttttactcagcactatgtgtgtgaaattcacccatgttgcatgtagcaatagggtgttttttattgctgtatagtattccattgtatgactctggcacaatttatttatccactttatgaatggacacttgagttgctttcagttttagctaatataggaataaatctcatgaacattatggtctacgtcttttggaagaactatgcagtcattcccaccggatatttagttatagatatctgggttatagactatatgttttagcagatactaccaaacaactttccagtgtttgcattaatatatgctcccacttgcaacagatgacaattccagctgcttcacattcttgccaatatcaagcaatgacagcctctttgaagagggacaagcattctggaggatatttagtggcatcttattgtggttttaacgtacatttacccgataactagtgattttgtgcatcttttaaaatgctscttggatctgggtgcagtggctcacacctgtaagcccaactactgtggagggtgaggcaggaggattgcttgaggccaggagttcaaggccagcctgggcaacacagcaagatcccatctctacaaaaaatttaaaaattagccaggcatggtgatgcccatctgtagttccagctactctggaggctgaggcaggaggatcacttgagcccaggagtttgaggctgcagtgagctgtgattgtgccactgtgcttcagcctgggtgacagaggtagagtttatcttaaaataaaatgaaatagggtgggtgtggtggcccatgcctgtaatcctaataactttgggaggccaaggcagatcacttgaggtcaggagtttgagaccagcctggccaacttggtgaaaccctgtctctactaaaaaaaaaaaaaaaaaaaaggctgggtgcggtggctcacgcctgtaatcccagcactgtgggaggccaaggtgggcggatcacgaggtcaggagatcgagaccatcctggctaacacggtgaaacctcatctctactaaaaatacaaaaaaatgagccaagtatggtggtgggcgcctgtagtcccagctactcaggaggctgaggcaggagaatggcatgaacctggtaggcagagcttgcagtgagccaagacgcaccactgcactccagcctgggcgaaagagcaagactccatctctacaaaaaaaatgagctgggcatgtggcgcatgcctgtatcctagctactccagaggctgaggtaggagaatcacttgagcccaggtaaaataaataaaatgtttattggctctttggctatattcttttctggagtacctgtttgtcttttgacaatttaaaaaactaggtttcctgattttggcttattttgttttgcagagattttttttttwttttttttttttttgagatggagtttcactcttcctctcaggctgaagtgaagtggcatgatctcagctcactgcaacctccgcctccagtttcaagcgattctcctcctcagcctcccgagtagctgggactacaggtgcccgctaccacgcccagctaatttttgtatttttagtagagatggggtttcaccatgttggccaggctggtcttgaactcttgacctcatgatccgcccacttcagcctcccaaagtgctgggatttcaggtgtgaaccaccacacccagctgccttcttattctcttaatgatgtaatttgatgacctgaaattttgttttgtttttttctttttcttttttttgaaacagagtatcagctctgttgcccaggctggagtgcagtggcatgatcacagctcaccacagcctcgacctcccagactcaagtaatcctcccacctcagcccctgagtagctgggactacaggtgtaccaccacgcccagtgaattctttttgttttttgtagagacagagtctcactatcttacccaggctggtctccaactcctgggctcatgcaatcctcacacttaagcctcctgaagtgctgggattacagatacgagccactgcacccggcctatggttaggttttgtgtgtgttttacttaagaaatcttgcggctgggtgcagtgactcaagcctgtaatcctagcactttgggaagccgaggcgggcggattgcctgagttcaggagtttgagaccagcctggccaacatagtgaagccccgtctctactaaaaatacaaaaaatagctgggtgtgggagcagatgcctgtaatccccgctactcaggaggctgaggtaggagaatcacttgaacctgggagacggaggttgcagtgagccgagatagcaccagtgtactccactctgggcgacagagcaagactcagtcttaaaaaaaaaaaaaaagaaatcttgcttactccaaggtcagaaattttctgtaagatattgctatgaaagatattgctttacttttcttatttaggtcctgggttcatctcaaattaatttcggtatatcagacataaggtggagaatgactgtttttttttttttttttttttttttacttagggatgttggattgacccagcaccaggaactaaaaagaccatcctttctcctcttaactgcaggggcacttttgtcgttaattagttgaccacatatgtgtgggcctgtttctgggccctattctgtttcatctgtctatccttgcacctttaaaataagtcttgatatttgatcatgtaagtcctgaggaagaggatttttgttttttttttttcaattggagatatttgagcaaggatccagttgagagtgaggagttgaataaaaaagagagagaagcsaagcatggtggctcatgcttttaatcccagctacctgggaggctgaggtgggaggatggcttgagcccaggagttcaagtccagcttcaaccagggggttgagcaagatcctgtctctatattagaaagaggtcgtgcggtgactcatgcctgtaatcccagcactttgggaggccaaggcgggcacatcacttgtggtcaggagttcgagaccagcctgcctacatggtgaaacctcatttctactaaaaatacaaaaattagctgggcatggaggtgggcacctataatcccagctactcaggaggccgaggcaggaaaatcacttgagctaggagacagaggttgcagtgagccgagatcgcaccactgcactccagcctgggcgacagagtaagattccatctcaaaaaaaaaaaaaagtgagagagagagggagaagataatctgcacttttcttagaagacagtaggagctgggatccaggtgtttggggaaggattggccctaggtactcatccactaattcattcaacattgatgtgtcagatagaacatttatgtgccagacacaagtatacagcagtcctgggatagatgaggtccttgttctcawggagctcccattgtagcattgagagaaaggtaataagtaaactgataactcagrcagcagtaaatgccatgaagaacaggaacaggatattgtgatagagagtaatggaagactgccctaactgggagttaagatttgaagatggagccagcctttatgagcagagtgaagagcatcccagacatagggaacacacaatgcaaaggcccttggagtagtgagagcttgtagtgctcgtgggaaaaacaaaagaccagtgtagagccgggtgcggtggctcatgcctgtaatcccagcactttgggaggctgaggcgagcagatcacctgaggttaggagtctgagaccagcctgaccgacatggagaaaccyggtctctactaaaagtacaaaattagccaggcatggtggggcatgcctgtaatcccagctactcaggaggctgaggcaggagaatcgcttggacctgggaggcggaggttgtggtgagctgagatcgcaccactgcactccagcctgggcaataagagtgaaactccgtctcaaacaaacaaacaaaacaaaacaaaacaaaacaaaacaaaaaaaccagtgtaggrgaacacaatagaaaagggggtgaggagcagggtaaataaatgatatcagagaggtagagaacagacttgcccagggagggtatcctttagggttgggcggaatgtgaatttttacatgcatgtgagttgggtagattacttgtgggtggtgggaccgtgggtatgtgctggagaaggggggattcattttgtctcctttttgaagctgctctcatacctaccctttctccctgcagcctcctgaatgatgccagcccagtatgctctaacctccagcctggttctcctggtgctgctgagcacagccagagcaggccccttctcttcacggtccaatgtgacactgccagccccccggccccctccccagccagggggccacacagtgggggctggagtgggaagcccctcttctcagctttacgagcacacagtggaaggaggggagaagcaggtggtattcacccaccgcattaacctgcccccttccactggctgtggctgtcccccaggcaccgagcccccagtccttgcttcagaggtacaggccctgagggtccgtctagagatcctggaggagttggtgaaggggctcaaggaacagtgcactgggggatgttgtcctgcctctgcccaagctggcacaggtgagcaggtgatcacagaagagggtggagaggtggggtggggtgggcattgctagtccataaaggtccttggtatgaattagaagaaggcactccttcctcaccatgaggggtgtggatgcagcccagaacacaacttggagagcagagctgggctacatgtcaaccaaagcatatgcgagggccctgagaggctgcatacattacacatactagcaactgggagcagacatggccttatgagatgaggctagcctggctaggggcctgcacataggagcactacataggctcagcctctctcccaggagagagactgagacttgcctctcccctcctactccaggtcagacagatgtgcggaccctctgcagtctccatggtgtgtttgatctgagccgctgcacctgttcctgtgagccaggctggggtgggcccacctgctcagaccccacagatrctgagatccctccctcttccccaccctcagcctcggggtcctgcccagatgactgcaatgatcagggtcgctgtgtccgtggtcgttgcrtgtgctttcccggctacactggccccagctgtggctggccatcctgtcccggggactgccaaggccgtgggcgctgcgtgcagggcgtgtgtgtgtgccgggcaggcttctcaggccccgactgcagccagcgctcctgccctcgaggttgcagccagaggggacgctgtgagggtgggcgctgcgtgtgtgacccaggctacactggtgacgactgtggcatgaggagctgccctcgcggttgcagtcagagggggcgctgtgagaatgggcgctgcgtgtgtaaccccggctacrctggcgaggactgtggggtgaggagctgccctcggggctgcagccagcggggacgctgcaaggacgggcgctgcgtgtgtgaccccggctacactggcgaggactgtggtacgcggagctgcccctgggactgtggcgagggcgggcgctgcgtggacggccgctgcgtgtgctggcccgggtacacaggcgaggactgcagcacgcggacatgtccgagggactgccggggccgcgggcgctgcgaggacggcgaatgcatttgcgacacgggctacagcggggacgactgcggcgtgcgcagctgccctggcgactgcaaccaaaggggccgctgcgaggacggccgctgcgtgtgctggccggggtacactggaaccgattgcggctcgcgcgcctgcccacgcgactgtagaggtcgcgggcgctgcgagaacggcgtgtgtgtttgcaatgcgggctacagcggcgaggactgcggtgtgcgcagctgtcctggggactgtcgtggccggggccgctgtgagagtggccgctgcatgtgttggccggggtacacaggccgggactgcggcacgcgcgcctgtcctggcgactgtcgcgggcgcgggcgctgcgtggatggccrctgcgtgtgcaacccgggcttcaccggtgaggactgtgggagccgtcgctgtcccggggactgccgtgggcacggcctttgcgaggatggcgtgtgcgtgtgtgacgcaggctactcaggggaagactgcagcacgcgcagctgccccgggggctgccgaggccgcggccagtgcctagatgggcggtgtgtgtgcgaggayggctactctggcgaggattgcggtgtgaggcagtgcccgaatgactgcagccagcacggcgtgtgccaggacggtgtgtgcatctgttgggaaggctacgtgrgtgaggactgcagcatccgcacctgcccctccaactgccacgggaggggccgctgtgaggaagggcgctgcctgtgcgacccaggctacaccggccctacctgtgccacccrcatgtgcccggctgactgccggggacgtgggcggtgtgtgcaaggagtgtgcctgtgccacgtgggctatggcggtgaggactgcgggcaggaagagcctccagccagcgcctgccctggaggctgcgggccccgggaactgtgccgggcaggccagtgtgtgtgtgtagagggcttccgaggccctgactgtgccatccagacatgcccaggggactgccgtggccgaggagagtgtcacgatggcagctgtgtctgcaaagatgggtatgctggcgaagactgcggagaaggtgagcaggcagccttccccagtgtactctgggactgtgattctgtgaacaggagccatggggaagacctgagcctgaggaagagtggagggagagcatgtcattccaaggagccagtgcccaccaggggcagcagaaccacaggggtggggctttccagtgggcaggactggccttcagatctctgaggagcaggttggggcccatttagttgcatttagggagattctgtgctcctgaagatggagagaaggtgaaggcgatccaagccccgttcagccctctgtcagctattctccactagcagagaggagtgggagttaggatgggcctcttcgatgtccctgagtaaaaggggctgtgggtgggggtggttgccttgtgctaaccagctttccctaacccattctcttgggcagaggtgccaaccattgagggcatgaggatgcatctcttggaggagacaacagttcggacagagtggaccccggctcctggccccgtggatgcctatgaaattcagttcatccccacggtgagagagatgccaggctccaggaggggactgagtgggcaggacaggggggcagggctcacctcctggaggaagttccaggtgatcattggttgagtccagatggctgggtacctgaagctgctgtaaaggctttcttagcctgcttgacactgggcactgaggyctctgcagcatctccagcaagcattggtcccacacagttggaacacctggtaacagagagctcagtacttcctgaggctgtccagtccattgttggtcatcactgttagctgttatcattgttgcagaatccgtctgcccctattctagcacctgtccgttggccctagctgggtattcatcagcagctggaatgttttttgctttccctgtgtcctacaccacaggccttcaggtatttggagacaccagcctgatgtcttcattcctcaggcaaaacctcccagtttcttcgccccttttccctmagtctttattctctgaatcctttaccttcctgtgattcttgcttttttcatgtgcccccaaaatgtggggacagagaggggcccactgacttactctgaatttatggacacttttctcagagctggcgtatagcaatttgtagtcacacaagcaggcagctgttttggtcatatttggttttttaagtaacttttaattataaaagtaatataggccccgtgcagaaaacttagaaaatacagattagcagggaaaaaagatggaaggaaagaagacaacattcaactatatacacttttttttttttcacctaaatataggcctttgcatttggccctgttcaatgttatcttttttggtttgggccaagctgtctaggctgttgcaataattttgagtctgtgaacttcatctcccacctccttgtcatcagtacatgcaaaccagttttttctctgtctccctccaacttgctctttttttttttttttttttttttttttttgagacagagagtctcactctgtggcccaggctcgagtgcagtggtgccatctcagctcactgcaacctctgcatcccaggcttaggtcatcctcttacctcagcctcccaagtagctgggactacaggtgtgcaccaccttagcctgctaatgtttgtatttttagtagagacggggtttctccatgttgcatgcccaggctggtcctgaactcctgggctcaagtgatctgcccgcctcagcctcccaaagtgctgggattacaggcatgagccaccactcctggccatccaacttgctcttaaaacattagagggaacaccctaaggacaaagccttgtggtcacttatttggggcctccctttgtgcagactgggcttttaagatatggtcgtttccccagctgcaaatcttctgacatttctaccatccaactcatgttttcctgcatcatcccacaaatgccatatggggtgtgggccatgtcatcctcatcttcatcagcttagccaggactctgtaaaaataaacaactccctgggcctaaagcctcggaaggcactaggacagaaggggacagctcagaggaactgtcatcctcactccactttgctttgtcttgtcattatgctcctcaggccagccccctactatgttctgcctctcctcactctccagccaaagcagaagcagaaatctcaacttcgtggcgcaaccaagatagcttgaattttttcttctgtttaaacatctttttttgttgttgttataaaaatactttaatcacgagacaagaatttggcaactagagaaaagaaaaacaattcctggctgctcctcactaaaacaagcactgctaacattttaaagtgtttctcccactctcttcttctctgtatatattatttacatagctctaatcttgaaagggtgggacttcgaaaaggaagtttcttaagaaatttcagggaaagaagaattaaaataaacacttgagataagaggagcttttagggcagcagttgtctcctgctctgagtaaataaatacaaaccgrtccttggtgttgtcaagggcgccgctttccagttgaagccctagactttctccctcactcagagccaggatggtggtgccaagttggcctgtgccaggcttggccatgttcttagctcatccattctgctctcggtatgggcatctgtcacattctgggtcttctctgagcctgggtgtggaaaacactcctgtaaaattggtccccagacactcctcttgggcctgggctacccaccctcagaccatgctttctgctgtctgtagctggtccctggcatcgtaccttctgccttggcaagtgccatctatttcttttcttttctttctttcttttttttttttttgagacagagttttgctcttgttgctcaggctggagtgcaatggcgcaatctcggctcactgcaacctctgcttcccaggttcaaacgattctcctgcctcagcctcccaagtagctgggattacagacacctgccacaatgcccagctaccctttgtccatttctgtgggtacagagtatattcaatagctgtctgtcctctggctgctgctgtcatcctagaagcctatctctacctcttaccttccctcttcscagaagcacttctctctcaaagcccaaactctgctattccagatcaagggacatacctagttattggaattatttttcagaatgcagaagaagaaagtttctcctctccctgtatatgtggcactgttactctgactcagtggttctcaaagtgtgttccctggacctgcagcatcagcatcacctgggagtatgttaggcatgcaaattgtcagactcccccactagatctactgagtcagaaagtctgggcacagagcccagtaacctgtattgcaacaagccctccaggtgattctgatgcccctccagcctgaggccccctaagtgaaggaatgttgctatyttgcaaagtgctagctccactatgaatgtgagagaaagcatggggaaactgagggagatgagttcctgaatgagaaagaggttcagatattccttgtctgggtgtgtcctgcagcctggaaatcagggctaggctaagtgttcactgggactcaaaacctcacagcctcagagaagtttttgcttgggtctagtctaaaaacagcaatgagggtgagataagctccaaggaccagccaaggtagagttcatctggagccacgaggttaatattgagataaactctaaaacttcccaagaacaaaatcagtgaagcaggccaggcgcagtggctcatgcctgtaatcccagcactttgggaggccaaagtgggtggatcatctgaggtcaggagtttgagaacagcctgaccaacatagtgaaaccccatctctactaaaaatacaaaattagctgagcatggtggtrtatgcctgtaatcccagctacttgggaggctaaggaagaatcccttgaatcttggaggcggaggttgtagtgagctgagatcgtgccattgcactccagcctgggagacaagagcgaaattccgtctcaaaaaaaaaaaaaatcagtgaagcagccaagctttaccaaggggcagagccagctgccagcatctgtttagaaagactgcttcagggccaggtgtggtggctcacgcctgtaatcccagcactttgggaggctgaggtgggtggatcacctgaggtcgggagttcgagaccagcctgaccaacatggagaaaccccgtctctactaaaaatacaaaattagccggacatggtggcgcatgcctgtaatcccagctactcgggaggctgaggcaggagaatcgcttgaacccgggaggcggagctcgcgatgagctgagatcgcgccattgcactccagcctgggcaacaagagcaaaactccctctcaaaaaaagaaaaaagaaagcctgcttcagaccagtaagatggtgctaggagacgtaggagacatgggttaggttgatggactttcaggggactgttcccagatggatctcaggaggaaccaagaagtgtctaaaggatatatatagggagaaggagaactctggggataggcttgcctcactgaaagaaccagacatcatcagggagcatccaaggtgtgtgtattgcggctgtggggatggggtgggtgtggataaagagaaagagacatacacacacacagagaaaatgaacaaataaattctgggaagggtaaggatttcatgggtcttgagttgaggccaacccaaggcttcctaggctggggtattctaaggcagggtgaataggagagggctggaggtcctatgtgcccaggaaaacttttcaacccagaaaactgacaaagctttacttcatcctcaacccagaaatctctacgtggccttctcatctggttttatacttcggtatttactatgttgatttccccacagttctcttggtttaggagagtaccttttgaaatttccaatcctacttggctgaatggaggtgtccccatcacagccaacatagctaggcagaacacagcatccttakcggctgtcctakctggacagcacagcaaaatgtggggctgttagaatgctcacagatgtacagttcctcctgtttccccagtggtgggcattccakgakaccctgcctggagcakggtccagtagattccctttggaggcaccacacataatcataattccttaaatgtacacttgtaggagtgttgttttctcacaagcatttgctaagcatagagattgttgtaagtatctcatatattcaagatgtggccatacatttagctattagagtctcagctacctgaggacagggaccatatattttatttttgtgtctccaatgcccagcatgatgccaggtacaaaatcaacaatcaggaaacatatttgtggaactttgagcaggtggttcttgttttgaggakcctacaacccgggtgaagakacaagaaaagtccctcaagggaaaggttgtgatgcgggtcccactcctgttacacagccatgagcaggcatctacgaggaggttcagggtgaggcagaccctttaaggagaaagtgcaacttgaaggggcatccttgatctacttcatttgttctgacaggaccaagcttaggaaaaggctcctcatgcccaggtagtcagagttgccarggcaaagctggagggagagtcctggtgcatgttgggtggaattctggcagatgaacacggggtgcccatgagaggggactctgacagataaatagggggtgcccatgagaggggactctgggatcacactgmtagggcctaaattcttgccattttcttggtgttggtgacgttggcaagatacttgtccttctgtgtctcagtttccttatctgtaaaatgggamtaataggacctgtttcgtagggttgttgtgagaattaagtgagttcatgtgtgtacctcgcctagaacagtggctcacaaggagttagcgctctcagcatgtttgctccccagcttgtacagggtcaagttccacacagtaccatgctgacactgtttagaattggagaaagaagagataagggggattgagcagcagaggcaagagtgccagcccctgagccacmtggtgctctctctcacagacagagggggcgagccccccattcacagcacgggttccaagmtctgcctcagcctatgaccagagaggactggcccmtggacaggagtaccaggtcactgtccgagcccttcgagggaccagmtggggccttcctgcctccaagaccatcaccaccagtgagagctggggctgtggggaggggtgtcctgagtggagatmtggactagagagggaatctgccctccgggagggcagaaggaaggggctgsatgggggctrggctcttggaaggaaagatgatgattgaagaaccagacacccacctgagtcctcctctttaacctggctagtgatcgatgggccccaggacctccgagtggtggctgtgacaccgacaacactggagcttggctggctgcgtccccaggctgaggtggaccgatttgtggtgtcctacgtcagtgccggcaaccagagggtgaggctggaagtgccccctgaagcagacgggacgctgctgactgacctgatgccaggcgtagaatatgtggtgactgtcacagcggagcggggccgggcagtcagctacccagctkctgtcagggccaacacaggtatggctggccagaggttagggaagggccctggtttcccagccttggatcctcctcctcaggagcccaggctcagggctcacagactcctctgaatgcttctggcaggtgtgtggcagtctcgaggcacctgctgggggccttgctctgtcctgaggccactggggagacagagccctcagatgcctggagtcctgtaggaaggttacaggttagcctatgaaaggaatggccccagggagagaagtgaataggagatgctgcctgatccagtcagttaagggaggttcttttttaaatttaggtaccgggacaggccttgtgctgatagatcttgtgggactggaattaggcagattagagatcatcagtcctgttgacttttggattgggattgctgggaggtgggtctcacagcagtgattttccactaaacctcgaggtttcttaacagatacctggatatttttcttttcctgtgacagggggacacccacctcgctgtagctcatgttctcttccccgactcccctttctctccttcagctacagggccccacccacgggcttctctcttctttctagggcaccaacagtggtgggcttggaggggaatgggggggctgcgggacactgaccgatttccctccgttctctttccaggtggggctggggcacagggaagaggcctctggctctggtgggagggatcgagggaggggctgccgcgggaaggagtgccgggagggagctgccactgacctgttctccccttttttgcccctggcagcaccaggccactacagttacccggaggtgcgccccccagccccgccccccaagtcccggccccggccagccccagccccgcggcccccacggcccccttggccctcgaggccagcagaggaaagggaggaggagtccccgcccaggccaagcctgtcccagcccccacggcggccttggggcaacctgacggccgagctgagccgtttccgcggcacggtgcaggacctggagcgccacctgcgggctcacggctacccactgcgggccaaccagacttacacgtcggtggcgcgccacatccatgaatacttgcagcggcgtctgttggccgccgccccagccggctcccccgcacccccgccccgccacccccgccccaccgccagccctgatcccggcaccaggaaacgggactccaaccagggaatctacggcctctcgcctgaaggcgtcgaccgggtggctgcgtcccgccaccccaagccagaggtgctgggcagttccgccgatggcgcgcttctcgtgtctctcgacgggctccgcggccagttcgagcgcgtggtgctgcgctggcggcctcagccgcctgcagagggccccggcggtgagctgactgtgccgggcaccacgcgcaccgtcagcctgcccgacctcaggcccggcaccacctaccacgtggaggtccacggggtgcgggcggggcagacctccaagtcctacgccttcatcaccaccacaggtagtgtgggctggggccacgggacacctatcccttgtccagcctcacctgccgttggagcctgcattcatgaattcctcccactgccaccccycactgcccccttctaccttcaggccctacctggccggggctccagggggsccccaggacaaagcacgagtccattgtccctagaagacgtccccaccccagggtcctggcatccatcctgtggatgcctaaggtcaaggcagcgccttctttggggtttcccgggacacttccaggattgttattttaggcaatagagggtgatgtggttggggcacctgcaaagattcactggagcagtttgagtgggctgggaattgaaaacagtgattcccgttctgactcactgtggtgagagtggctgaagactgtggttagtggttactgttttccacaatttggccttgaccttgaagggacacatcagaactgcgtgggggtggcctgggtgccatcaggcagcaactgtatattggggaggtgaaaccactgcttcttaagctggcttttcagaccccctggctcactttatgctggtctctcccacaggaacgatgtctgggcttggggaaagggcaccctgtggctgctgtggggagggtggtggacctcttcttcccccatagggcccagatgccacctgacytggatgtccacccccacaccctctctctcttcccactgcccactctcctcttgcatcctccctctctaacaccactgtctttcttccaggcttctcactgcagcactaatggaagccacctgaccaccacccagtgsgggggatgtatgtggggagggacatggaagtctccgggggctggaggtcatggaagccttgtggggtgaaggatagcaggctttattttacctattacctgcctgaagcacaggcccgtctgctcaggaatgtggtagatgggggtgtttggaggattggctgacctttgggaggagggagtggcccaggtgagggaaccagaagtagaagtagaacaaggctcttagaggctggagggcagaacctggggactggggattcctttctagttctcatactggactctcctctttttctcaccctgccccttcccagggtcctcacccttgggcctcttggggactaccgatgagcctcctccctcaggcccctcgacgacgcaaggggcccaggctcctctcctgcagcagcgcccccaggagctgggagagttgagggtgctgggcagagatgagacagggcgcctccgtgtggtctggaccgcccagcctgacacctttgcctacttccaactgcgcatgcgggtgcccgaggggccgggggcacatgaggaagtgctgccaggggacgtccgccaggctctggtgcctccaccccctcctggaaccccgtatgagctgtcacttcatggggtccctcctgggggcaagccctctgaccccatcatctaccaaggcattatgggtacatcttggactctgctcagatcaatatcctgagattgggggaggagctggggttattgggacttcagaggtaggatggatattgaggggccagtgaagggcagggctgatgtttggggctggatagaggagaaaaggagagaaaaggaattgcaggttcagcaggaagatggatcgagggggatcttaaaacaatgataaggatgggtggggagaggggaaagaggcagaggtaaaaaggccgagggtgggacagagattccaggagagaggctgaaggtccctggccctccacctgcagctttccttgccctgtcccctgcccccactcttcggttgctcctctgcccttccctgccctataaatctttcagggtgggcatgggaaggcctctggacactgaccctcagcccccaatacctcgtccctgggagcctggtttgcagtggacagcagtccatggtcccatcagccagtttctgctgggggtgaaggctccttggggcagggggctccacagccatcaggacttcagacatgratgaggtttgcaggaccagtgaaagacaggtcctggggtacctggctttcacatcccctctttgttcctctctgtgggaccaggrtggctgactcatcccccagctccaggtcaagctcaccactggaagagagggtggtaagagagacagcagctcaggtgggcagaggagctttcagactgctctgatgctgcagcagggaggcttgaaactctcattcagaaccagggggacctgaaacccccgcaaagatcctggtgtgcagagagaccaagaccttgtgagggatggagaaactgtcacaagggaagaagcagagattgagagggaaatgcccctcttccagaagagctagtcactgaggggtgggcagatagagtcttccggggagggatctatccaggatggagtgaggtgggcaggggagagggaaggagacacagacaagagaacggttgagtccactatgctttgcttttgcctctcaaactccagacaaggatgaggagaagcctgggaagtcctcaggcccaccacrcctgggtgagctgacggtgacagacaggacctccgactccttgctcctgcgctggacggtccccgagggcgagtttgactmcttcgtgatccagtacaaagacagggacgggcagccccaggtggtgcccgtggaaggaccccagcgctcggccgtcatcacctccctggatcctggccgcaagtacaratttgtcctgtatgggtttgttggcaagaagaggcatggtccgctggtggctgaagccaagatctgtgagtgacagcagtaacaccctgccctctgtactgccctgaagaggttttctcagtgctttgggaacctgctttgggagctccgggaaggcttcctggaggcagtggtgcatgagctgaattctgaagggaaagtagtggtggggcaggcaaagagtttgagaagctcagtgcagcctgagggagtcacggtgagtaaggtggggagagcatggccagtaagagaatcactgttacagtttcctctggctggagaacagggcatgtggggggtgccaaagggcctggtctcagggcttcctgtgctgtgctgaggggcttgggcctcattcgaaggcccctagagggcctctgaagggtaaagtgggagagtgatgagactagatatttatcttgcaaataaccgggtggctgctgagactagctggagaagtgagttaagagctggtaaaggctagcagggttgatcctgcctataatcccagcaccttgggaggccaaggcaggaggatcgcttgaggctaggagtttgagaccaacctggcaacatagtgagaccccccatctctactataacaaaagatattagccaggcgtggtggtgcgtgcctgtagtcccagctacttgagaggcttgaggtgggaggatcgcttgagcccaggagaccgaggctgcagagagccatgattgtgccactgtactccagcctgggtgctatccacactctgcacagagcaacaccctgtctcaaaaaaaagaaaaatgatgatgggtcagctgggatggtggcagtggggctggatgggggaggcgaaggaaagcaaggtgtaccaggcagcccccagggttctggatgagacagtcccattccctgaggcagggagcagcagaggtggggaacaacgccttagataaacttagatcaatatctaagagacacttacataaataccttttgtgcatttattgagagtcagttgtgatcaagatgttctctaagtggatcatcacaccccataaagcacacctgggaggcatgcctactttataggtcaggagaattgaggcaccagagtagtcgtgtggggttggggaagagacagggccactggaaccctgtcgacagcctacactcacagcggaggcagaggaagaagagcccacagggtagcttgcggagtgacttgcagggaggggcagaaccagggagggtgctgtctggactccaggaaggagggtgcggttggacttgtcagattccggaacagtgattcaagggctacggagcgtccacagaatttagcaatggcaaggccacccctggcctgcatgagagctgctgcctggtggaggggtggagctggatcgggagggtggtggaggtgaggacatggctgcaatcagtgtagacatcactttctggaatctggrctgggaatgagagcaaagagggaagatggaggctagagagagatgcacacagagtgggggtgaggaggggtgtgacagtagcttgttgaaatgctgatggcacagctgctggggagtgaagggtcagtgctgcaggcgagggagtccatccatgggtcaaagttcccaaagaggaggagaggcctgcagcatagatgagggaggctgtcccacrttaaaacgcttcaaggattgtgctctcctctcttggagaagaagccagctagtagttaggcttggaagcagtggaggttgtactgggaagatttccctggctatggagatgtgaaagggcctggctgggctcccctctttctgaagctccctgctgctctggtttgtggttggaggcagagccacactagtccacgcagtgcttccatgccgtttgaaagaaggcacccattccttaaagtggacaccactcctcaccagggcacacagctcggcaagcagagtgctggctggatttcagtccctctgtactccctcagcaaatgcacttttgtgcagtgaacaacctgcacagcctcacacagcattcctatgtgggatttggcttccccattctccttggacctaagtctctcccttctctctacccactcttcctagtgcctcagagtgacccaagtccagggactccaccccrcctgggaaacctgtgggtgacagaccctaccccagattcactgcacctctcctggactgtccctgagggccagtttgacaccttcatggtccagtacagggacagggatggacggccccaggtggtacctgtggaagggcccgagcgttcatttgttgtctcctcactggaccctgaccacaagtacagattcactctgtttggaattgcgaacaagaagcggtatggccccctcacggccgatggcaccactggtgagtagcagccacctcagcccccatgtgaccccttctcagccccatgcacacttcccttcagcccaaaaccagctggggtcccccagcaagacagctgactccagcttcccggccccactccagggctgaggggcagccagactcccccgcactgctgggccccttccatcccaagcagcagctccccgtggcccagaaggtgtgtcataccctggctgtgtcaggcttcccagaagtttagcactcgaattaatggactagtgaccccccaccccccataggtgtgacatcccgtcgaaaccccaagccccagtcccaggctgccagttcagcacctggctggatctccttgtttacagctccagagaggaaagaggagcccccccrccctgagttcctggagcagcccctcctgggggaactgacagtgaccggcgtgaccccagactccttgcgtctctcatggacagtggcccagggccccttcgactcattcatggtccagtacaaggatgcacaggggcagccccaggcagtgcctgttgcgggggatgagaatgaggttactgtccccggcctggatcccgaccggaagtataagatgaacctctacgggcttcgtggcaggcagcrtgtggggcccgagtctgtggtggccaagactggtgagtcatggctgccaggcctccctcccctgctagccccatcctgtgagcgggacttggctggggctccttccagcctccctccatcttcgccttctcagctcattttgccaaagcctccacccacttcctcccgcactgctctcctgtcctctgcatgccaggtccccctcatccagcctccacctcctcatctcttcctcagcctcacttcttcatctccaagggcaggtcctattttcccccattccaaacacctggactcatccttccacctggggctgtcctccccacagatgtcctcaccattcggtcactgtgttctcacccctcagtttttactgggctccttcatggtctggtttgggccatggtcacttctgggcttctgtcacctgctgcccacaacctcctgccatttctgctgtgttcagaggtggcagatccaagtgacaagagcaccacgtttctctagcctttttgcagcatgaagaggactcctctcagctcccgactccttgactcccagcccccttggaacagggcaaagggattgtgttcagcccagcatcccagcctgttcctccatgtccccagcctttccctgtccagtgccattcccctggcctgtgaattatttgatgagagatagtgtggatagtggttaggagcaaagactccggagccaactgcccgagtctcactaccagccttgcaacttacttcctgtaggaccttgtgcaaattgcttaacctctctgtgcctcagctttcccttctgtcaggtggctggatttcagtccctctgcacagagctgttggaattacatgagttaatatatgtataacacttagaaaggccaggcacagtggctcatgcctgtaatcccagcattttgggaggccaaggcgggtggatcacgaggtcaggagatcgagaccatcctggctaacacggtgaaaccgtgtctccactaaaaatacaaaaaattagccaggcatggtggcaggtgcctgtagtcccagctactcaagaggatgaggcaggagaatggcgtgaacccgggaggcggagcttgcagtgagccgagatcgcgccactgcattccagcctgggcgacagagtgagactccatctcaaaaaaaaaacaaaaacaaaaacaaaaaaagcccacacacttagaatagtgcttggagcagcaaagcattttcagagtgagctgcaatttctccctgactctctcacttcccagtaatcttttttgctccccacctccctcccttcctctgggttgtcattcttgccaattctttcctcaatctgctatcccaaagtagtcccccatgtagcaggtcacagaagggctggtttcccttgtgccacagtctccccactccatggagcctcagcagagacctaactgtagggggcgggtaggtgcccacagggctgtgattccagagccagccagggaaggacatgtctctccttggatcccactcaccccagaatttttctcccactcatgcctggagccctgccttagcaattcattccttggggttaaaggggagggaggggcagggctgcctggggaggccacagcaagagcacattccatggtcagatcctcatatgaggggtggggcagccagagtgccctggggagggcacaggtaggaagaggcctcactgccctcctcactstctgaggtcagcactgtcagtgaacgtggtttggaagaaccctcagaggcttcctctcttcccatctcagctcctttctcagacacgaagggagacccctcacccccacagaacccaccagagcaggatggggcaagggctgtctcagccttctccatscgtgagtgaccgaatggcaaatacaaaggctacagagcccctgagcccacagcgtaagggcatttccatggctgtcatctgtgggcagcagcagcaaagccagcagccctttatgcctctatctcttctctcagctcctcaggaggatgtggacgagacccccagccccacagaactgggcacggaggccccggagtcccccgaggagccgctcctgggggagctgacagtgacaggatcctcccctgattcgctgagcctcttctggaccgtcccccagggcagcttcgactctttcaccgtgcagtacaaggacagggatgggcggccccrggcggtgcgtgttgggggcaaggagagtgaggtcaccgtgggaggcctagagcccgggcacaagtacaagatgcacctgtacggcctccaygaggggcagcgcgtgggcccrgtgtccgccgtgggcgtgacaggtgagtgaggggcaggggcctgctttggttccctcccactgctggctcccagcttccctgtagccagttgctctccttgctccagtggaaccttgaggctgcctgccaggggaagacctagaaagagcatgtcactggggactggcgtaccaccagctttcatggccctgagcaagttttaaactttctgcacctctgtttccttgtccgtaaaatggggacacctacctcacagagttattgtgagggttaagtgagttaacagatgtaaagcatcaagaatgggcctggcaaaagtaaatatgctgccagtgtctgctgtgagaattgttataaatattcttactctgaggtctgctttgtcccctttggctggttcagttacttggtcagaatgcacatgaatctaaggccataccaccctgaaggtgtcctatcatctcctctgatctcagaagctaagcagggtcaggtctggttagtacttggatgggagaatgcgcgtgagacattggcctcttcatcagtacagcttgaagcaagctttcttttctttcttgtctttttttttttttttttttttttgagacagagtctcactctgttgcccagcctggagtgcagtggtgcgatctcagctcactgcaacctctgcctcccaagttcaagtgattctcctgcctcagcctcccaaatagctgggactacagatgcgtgccaccacacctggttacttttttgtatttttagtagagacggggttcaccgtgttggccaggctggtctcaaactccagatcctcaagtgagccacctgcctcggcctcccaaagttctggtattacaggcgtgagccaccacgcctgaccacaaagctttctctttcttctttctctctttttctttctttctttctttctttctttctttctttctttctttctttctttctttctttctttctctttctttctgtctctctctctctctttctttctttttttcctttctttctgttttttgagctctgttgcccaggctggaatgcagtggtgcaatyttggctcactgcaacctttgcctcccaggttcaagtgattctcctgcctcagcctcccgagtagctgggattacaggcatgcaccaccacacctggctaatttttgtatttttaatagagatggggttttaccatgtcagccaggctggtctcaaactcttgacctcaagtgatccacccgccttggccttccaaagtgctgggattataggcataagccaccacgcccggccacaaggctttctttaatactcatccagtgagtgactttacagcaaagaagaacatcccttccaccctttctctcaggcctggttacagggccacatccaccaccacacaggaccagcctgggcacctcctctccagggcctcagcccaagaggctgagtggacagcagtgcctctgggaccctcgggctgacctgcccggtttagtcacagtgaggggaatctcttttttcctttgctcacagaaacaaagacacacctttctcaaaaataacttttactataaggggaaagattwaaaaattaaaagtagagaaatagatagttttccagaacatggtttctgtaattccaccaagctcagcctcatcatgacttggttgatttcatttccagaaccttccaccctcaatttattttctttgcctcagtcagccctgagaagagggagacggcaaagccaccctgagtggctgtccttggggcctgaggttgtagggtggaggctggtgccaggcccagacatgctgccaagtctgctcctggagtgaccctccctctgccgctctgtcccagggacccacactgggctctgtgaggccctgtgcctggtccctggggtaaggatgggctctgtcaggcactgaccaagtcggtgcagtagagataaatrgagtttgggaatctgasaaactgagttccttcctgtcttcctctgttctcagctgtatgatttttatttttttattttattattatttttttgagacagagtcttgctttgtcacccaggctggagtgcagtggcatgatctcagctcactgcaacctctggctcccaggttcaagcagtcctcctgcctcagccccccaagtagctgggattacaggcgcccaccaccacacccggctaatttttgtatttttagtagagacagggtttcaccatgttagccaggctggtctcgaacttctgacctcagatgatccacccgccttggcctcccaaagtgctgggattacaggcgtgaggcaccgtgcccagccagctgtatgatcttgaaaaacttacctcctctcctggaacctcagcttcctcatattcaggagggagtaaacgctgcccagcttgttgtcacggttaaaggtggtgatgtaacatgtctggcatcttctcagctcattcatcttttgctcagaccttcccgygagggaatccctgtatatccatgttctaatgctggatattttgaaacatgtattttacacgtcctggataaaatagatgaggccctttaggaaagaaatgggcatcagtgcgcattatcagagcagcaaaaggacgaagcagctggagtccgccaagctgggggctgtgtctggcagcacacacagtgcagttgccagggggagaggtgcgtggagctcattagacacacttctaaattggaaaaggactgtcccacatgcagcatggggactgccagagtcatgaatcgttataattgtacctttccagttaatccaaaccaccagcaataaagcttgatggtgaaggacattttcattccctcatggaaagaagtgcagagagggcaaaaaggagcagggaatgggtgctgcaggaacaagtaaggttagaaggcaaatgaaatgagagaaaatgcccagcctggtacctgtacatagtagatgttcaatacttggtggtcactctgctccctcccaccacctcagctgcctccatgcctgccctccccagcctgactcatttctgtctgcccgaggcctggtcaccagcctgttttaagcagttgtcacttgcttggagccttgtcttgccctccggaggaagccagagaaacaagttcttgggagccccacccatccagccaccttctctgccattttgcctcttgggaccaccttctagtttgctcactaatgagtgcttcctcatgcgggagtggtggggatctgcaggtcctgagcccagacctgtagaccactcattattttacagacatctgtggagcacctactgtgtgccagggactgggacacagcagtgaataaagcagagctcctgcctgaggagctcacattctagtggagagggacaggcaacaaattgcacaaatatgtcagtggcaccggatgtgacagtgatgagtggtggggaaaagcagagcctagtagggagacagcaagggcctcactgcgagggcagtgtctgaggaaagccctgaaggaggtgagaggacagccacctaggcctttggggaaagagcatcccagacagaaggaagagcaaatgcagagactggcaggcgagaagcagccccagatgtctgcagacagtgaggratgcagtatgttttgtggtggagttggaggagggcaggcaatagggaatgatctaagagatgaatatgggacctcagaggccagtgcaggacttggatttcaccctgagtgaggtagaagccactgcgggaaccagctctggctaatgtgttaacaggatccttctggctgcagacccaacagactaaaggggggtgagggcagaaggcgatgacctgagagaatgttgtgataatccaggaggagccagtggtgcttggaggtggcaaggaggggtcagactctgaaggtagtgacaacaggcggatacccacagggcggatgtggagtttaagagaggactcggggatgactctggcggtttagatctgagcagctggaagaatgaagttgtaatcctggtcaggcgtggaggatcatgcctgtaatcccagcacttggggaggccgaggcgggcggatcacctgaggtcgggagttcaagaccaacctgactaacgtggagaaaccccatctctactgaaaatacaaaattagccggacgtggtggcacatgcctgtaatcccagctactcaggaggctaaggcaggagaatcgcttgaacccaggaggcgtaggttgcggtgagccgagagggcgccatcgcacaccagcctgagcaacaacagcgaaactccgtctcaaaaaaaaaaagttgtaatcttactgaggtggggaggctgtggcgggagcaggtgtcaggaagctcagaggctcagttttggacttgttgagtttgacacacaagtaggcctccaaggaagacgttgcacgaacactagtctggggttcaggggaggtctggacagagggtgtaaatctggagtcattggcatatagatggaatttcagcgctctcccagggtgtcagtgatggttgatactcttctcccccaacaaatgcagcctcagacaccgagcagggacctagtgaaggactgttgaccagacagatgttcagatcaatgcgcttttacatcaaaaccatcatgcgggttccacaaatgcaacagacatcgctgggtgtggtggctcacacctgtaatcccagcactttgggggctgagrcaggtggatcacctgaggtcaggggtttgagaccagcctggccaacatggcaaatgccrtctccactaaaaatacacacacacacaaaattaggcaggcatggtggcgcacgcctgtagtcccagctacttgggaggctaaggcaggaggatcgcttgaacccgggaggcagaggctgcagtgagccgaggtcgcccactgctctgggtgacagcragactccatctcaaaaataaaaaataaaaaataaataactagacatcattactataagaaaagggggattctttactaacagccccctaccatctctgtcccagccccacaacaagaagagacccctccagccactgagtccccgctggagccacgcctaggagagctgacartgacagatgtgacccccaactctgtgggcctctcctggacagtccccgagggccagtttgactccttcatagtccagtacaaggacaaggacgggcagccccaggtggtgccggtggcggcagaccagcgagaggtcacagtctacaacctggagcctgagagaaaatataagatgaacatgtatggactacatgatgggcaacgcatgggccccctgtctgtggtcatcgtgacgggtgagtaatggggggactcagtcctcatctctggttacccagagctcccccaccccatggcccttcttccagccctgccttggtaccaccgcaccctcactgaggggctagatcccctcaggccctggctcggtgaccctgccagtctttctgttccctgacccctttactcctcccagggctagagccttctcagccctccagctccttccccatctccactctgccccccgcccaggggaatgtcttatttccatttggcctaaatccagccacagactttctctccccctctccgactgcccacagctgtttccaccccttctctttacaaccctgctgtgacttggacacagctgccacctcctgcttctgcccttktttgttgaggcgaagtgctttacatcctgagtcccttctcaggagtcctctgccacctgcctgcactgcattccatcccagccctggagagttttcatctctccaggaggcygcctcactcttgctctgggctccttcctgcccctcatggcttcctgggcacaggttctccatgattgttgtgctgtggcatctggtgaaacccctaccccacctgaaggcaatgtttttaaatctgtaaaataagctgtataggattacaaaggaaacattatatttatagacagttatcaaaatatttcttttttatttttgagatggagttttgctcttgtcatccaggctggagtgcaatggcgcgatctcggctcactgcaacctccgcttcccaagttcaagcaattctcctgcctcagcctcccgagtaactgggattacrggcacgtgccaccacacccagctaattttttgtatttttagtagaaacagggtttcgccatgttggccaggctggcctcaaactcctgacctcaggtgatccacccgcctcggcctggcatgagccactgcacccggcccaaaatatttcttaaaaatccaaagttacgatttagtaatacttggacttatttactagttcattaaataacaggacttggtggcgcgtttactaaactacaaaatttagaagcagtgatggatataaaaggtattttaaagtttctgcaataactctaaggtgacatgaaaacatctgtggtttctattggtaacaaagtcacaataattctactctggtgggttttctatattagttttggaaagaaatgctgcatttcagttagaggtctggaagtaaaggtgtaactattccccatctcagttcacagcccccctgaggccctcaaagcccaggggttctcccctcagagatctcaaccatgttctttgtcttcccaaatcccagctcccctcccaccagccccagccacagaggcctccaagcctcccctggagccacgcctaggggagctgacagtgacggatataacccctgactctgtgggcctctcatggacagtccctgagggtgaattcgactcctttgtggttcagtacaaggacagggacgggcagccccaggtggtgcccgtggctgcagatcagcgggaggtcactatccctgacctggaaccctcccgcaagtacaagttcctgctctttgggatccaggatgggaaacgacgcagcccagtctctgtggaggcaaagacgggtgagatgggcccctacacagctgagcctgaggccacagccttcccacccttctcttcactccctctgctgagtcttccctttgtccacctgctctgtctcatttgaaaagccacatggggctagcacagtgactcatgcctgtaatcccagcactttgggagtccaaggcaggtcaggagtttgagaccagtctggccaacatggcaaaaccctgtctctactaaaaagacaaaaattagctgggtgtggtgatgggtgctagtaattccagctactcgggagtctgaggcacaagaatcacttgaacccaggaggtggaggctgcagggagctgagattgcgccactgcactccagcctgggtgatagagccagactccgtctcaaaaaagaccaaaaaaaaaaaaaaaagaaagaaaagccgcaaagcagatgaggaccaggagagtggggccagttcctgggtctgctgtcccctgctgactctgcctctcttctcgtaatttccacttttgttggatgagggaagcccctacaggcctcttcctgcagggtggatgtgggagcctgggggtgctgggagaaggggcgaggggagccaggaacccttcctgccttgcgaatccatcacctcctgagagtctttgttgtctcccctgtgactctcacccaggttctcaccctcctagctcaggcctgtctgggcccatatgtgcctcctacagaggctgcccttccttctctgccctcctcctgaagtctcagaaattgggaaccagaggagcccagcccagctgtgcccctttccgagggttcagtccaagccctcccctgcccctgggggctccctattgccagaaaacttgcaataacaatgtcgtcagcgtcctcaccgtccaggaaggcagcaggccagctccttctcaagccctgggatggctcctcaggcagacaccagatcccttccctgcctgagctccccggcatcatccccctcaacattctcacaggcagcccacgctccttcaccaggcccagtgggagccttagttctcccgggccagccrgtgcagaataagaaagggaacggagaagggtgagaactacctgtgtcgtaacatcctgcctccctgacctgccgagtgcccccatcagggatcctgcgctcctcggggccggccaaatcacccctttcctcaggggccggccaaatcacrgccaaatcgtgtgctcctgggtaagaggagatagagacccagtctgtaagaagctgcaccctgctggggaagcagtctgtgagaggcggaaagaggctggacagaaaggggagtaagatgaggcagggagctagggaatctcttttcctggaggtgactcaggacaggtgaccctccccacttgggtcaaggggagagaggcatggaccagacggagatggtggtgaggatgggaggtgatggaaatattttggggaagcactgagcatttgggcagttctgggtttttccagccccagagggaggcagtcaaggagtcgttttggaaaaaataaacacaagaacctttcctctccagttgcccgaggtgacgccagcccaggggccccaccccgccttggggagctgtgggtgacagaccccaccccagactcactgcgcctctcctggacggttcctgagggccagttcgactcttttgtggtccagttcaaggacaaagacgggccccaggtggtgcccgtggagggccatgagcgctctgtcactgtcacccctctggatgccggccgcaagtacagattcctcctctatggcctcctgggcaagaagcgccatggccctctcactgccgacggcaccacgggtgaggggcattccctgcaggtccctgctctgctcccctcaggccaagcagcagacggtcacttgtggtggctgccattaccattatttggccccagccactcggctcagatccagctccccacgtccctgcacaagcccctagcacagcccggcaggactcagccacgcaaagccctgtctccagacctctcaatcctgcccgtcgaggtcacccagtcttccagaaacagctcagccgtttcctctccgtgtctccatctcagaagcccggagtgctatggatgatactggaacaaagcgtcccccaaaaccccgtctgggggaggagctgcaggtgaccaccgtgacccagaactccgtgggcctctcctggacagtccctgagggccagtttgactcctttgtggtccagtacaaagacagggacgggcagccccaggtggtgcccgtggagggcagcctcagggaggtcagcgtgccgggcctggaccctgcccacaggtacaagctgctgctctacgggctgcaccacggcaagcgtgtgggccccatctcggccgtcgccattactggtgagtgtgcggcagctggaacacctgtgcctccttcccgcctggctctcctggtctgactgagccataagatctctgagcttcccattttatatcatttccattgatccagaaagtttccttgtgcccctttagagtcagttgccccagtcccagcctccagcaaccactgtctgctttcgatcatcctggagacagcattttgactctccatgtaatggaatcacaatacgcagtctcttgtgtttcatttcttgcaattagcacaatgcttttgaaattcacccatgtgcagcaaaagctggtctttcgattgctgactgcttgccctcactccctctcctccctcactcctcctgagagtctgggtgcagcgacacaccagccatctgtctctacctgtctctgtgaaccagccggcagggaagaaacggaaactgagaccacggccccgacccctccagcgcctgagccccacctcggggagttgacagtggaggaggccacgtcacacaccctgcatctctcctggatggtgactragggagaatttgactccttcgaaatccagtacrcagatagagacgggcaactccaaatggtccgcataggaggtgaccggaatgacatcaccctctctggcctggaatccgaccacagatacctggtgaccctgtatggtttcagtgatgggaagcatgtaggtcctgtccatgtcgaggccctgacaggtgagaactctgcccactatgcctcctttcagatggctgggagagtccagaggacagcagagtcccgcggataccctgcccacctcagtcctctctttccatgtctctgtccagtcccggaggaggagaagccttcagaacctcccacygcaacccccgagccccccatcaagcctcgcctgggggagctgaccgtgacagatgccacccctgactccctcagcctgtcctggacrgttccygagggacagtttgaccacttcctggtccagtacaggaatggagatgggcagcccaaggcagtgagggtgccagggcacgaggaaggggtcaccatctcgggcctggagccagaccataaatacaagatgaacctgtacggcttccacggtggccagcgcatgggccctgtgtctgtcgtcggggtgacaggtgagtggatgatgggagccccagggtgggarccatgggagggtcaccctcttgctctttggwgatgactggtggggaatgggacaagggtctggtcagcaccacagacctgcttgtggctggggctggggctccccttgggccttcctgtgaggttgaccactggctcctcctgaacagagaggggccatcgggaattttgctgtgctggtggctgtcccaggtcccccacagctgaccctggaacttgtcatgtgtgttagctgtcagctgagcaggaccacccagccccaagagtaggcctctctgaactgacctcgggtcccccagtcatagccttggcttctccctccttttccccagtacccaaggacatccccctcactctctcttcctccttctcagctgcagaggaagagacccccagccccacagaacccagcatggaggccccggagcccgctgaggagccrctcctgggggagctaacagtgacaggatcctcccctgactcgctgagcctctcctggacygtcccccagggccgcttcgactccttcaccrtgcagtacaaggacagggacgggcggccccaggtggtgcgtgttgggggcgaggagagtgaagtcaccgtggggggcctggagcctgggcgcaagtacaagatgcacctgtacggcctccacgaggggcggcgcgtgggcccagtgtctgctgtgggcgtcacgggtgagtgtgcrctgcagagccctctgggttgggtcttagcaaagtacagcctccagcatctcctccactagggacccagaaccccaagacctcaaacctgtaatacaccctgttcactaaaggctcaggacaggtgtgatctggggacagagagagcaaatccaggagaagtgtcggagccatatgggaaaggcccccagggactgaggcctcttgggaggtgattcactggctggtttgtggctctccgcttttccttggaactctatacataactctttttgtgagattggaacacatttttgaaatacaaattaattaaattaataagtatttgttaaataaaatttcaaatgtataaacagaaagaatagtacaaagaccctgccatcctccttcaatcaaatatcgacttctggccagtctggctcatctctgccccacccacttcctccactagaatcactagaatgttttctttctttctttctttctttctttctttctttctttctttctttctttctttctttctttcttycttccttyctttctttctctttctttctttctttcattcttttcttttctttctttctttttagacaaggtctcactctgtcgcctgggctagagtgtactggcacagtcacaattcactgcactgcagcctcaacctcctgggcttaagggatcctcccacttcagcctcccgaatagctgggactacaagtgcactccaccatgcccagctaattttttgtattttttgtagagacagggtttagccatgttgcccaggccagtctcgaactcctgggctcaagttatcctcccacctcagccaaagtgataggattccaggcgtgagccgccacacccggcctgaatgttttctttattaacacctttatggagatataattcatgtggcataaaatacacttgtttttagtgtacaacttactgattttagtatctttacctacttgtgcagccatcaccacgatctaattttagaacttttccatcacccccaaaagaaatcttgggtccagacccattcctacctcagccctagtttataactaatctacttttttctctgtagattgctgttccagaacatttcgtataaatggactcaaacaatatgtattcttttgtgtctagcttctttcactgagcataatgtttttgaggttcatcaatgtagcatgtagaagtactatacttactacattgctattgattgattgattgattgattgattgattttttttgagacaaattcccactctattgcccaggctatagtgcagtggcatgatcatagctcactgcagccccagactcctgggctcaagccatcctcccatctcagccccccaggtagctggggccacaggtgctcgccaccacactcagctaatttaaaaaaattttttgtagagatggggtctcacagtgttacccaggctgatatcaaactcctggcttcaaggaatcctcctgcctgggccttacaaagtgctgggatagcaggcatgagccacctgctctctctcagccactacactgctttttattgccaaacagtattgcattgtgtggttatactactgcagtattttaaaaacgaaccacagacatcctatgctttcatcactaaatatttaaaggtatatctctttttaaaaaaattatttttaaaaaatccacaatatggccaggtgaggtggttcacgcttgtaatcccagcactttgggaggccaaggcaggtggatcacttgaggtaaagagttcaagaccagcctgaccaacatggtgaaacccygtctctactaaaaataataataataataataaattttaaaaagtacaaaaaagcggagcgtggtggcacgtgcctgtagtcccagctacttggcgggggttgaggcacaagaaattgcttgcacccaggaggtggaggttgcagtgagccaagatcgcgccactgcactccagcctgggtgacagagtgagactctgtgtcaaaaaataaataaataaataataaaattccacaatacaattagcataccttgataagtgaacaatcatgccttgatatcaagtatccaggtagtgctacagtctcccgagtgtctcataattgttgtttcccaatttgttgctgaaatcaggtctatagaaggaggatacattgcaattgagaaaactgaaattttaaatagagtaatcagggaaggcccacagaagaaggtggcttttgaacaaagacttaaaggaagtgtggggatgagccatgaagatatctggggaaagaacatttaggtagagggaacagtcattgtaaaagtactgaggtaggaggctgcctggcatggttgagggaccataaggaagccacaaaatctgattatgattataatcagaaatcgatcttaagttagggccagactgggcccaccttctgacctgaattcaagacagctggggcctcaacacctccttgcagcaagagaaaagattctgtttctatctcttcctagcccccgaagaggagtcccctgatgctcctcttgcaaagctgcgcctagggcagatgacagtgagagacatcacctccgactccctcagcctctcctggacagtccccgagggccagtttgaccatttcttggtccagtwtaagaatggggaygggcagcccaaggcggtgcgggtgccgggacacgaggatggggtcaccatctcrggcctggagccagaccacaagtacaagatgaacctgtacggcttccacggtggccagcgcgtgggccccgtgtctgctgttggtttaactggtgagtgtgcagtagggcactgggccctgccctgaactagactcagtttcccttttattgtcagtatctggtggctttattttactttccctgagaccaagcctcccaagctcctgggaatggttctgctggtgccttcactccgagactttggtattgccccaggtcttctgcccrttacacatgggctttttgggttcccaaagaggtgggggaccaggaaaataacacagactgaggcacacctggggttgaccatagcttcagcccatttgagctgtgtgtcctcaaragactcacacaacctgtctgggcacggtggctcatgcctgtaatcccagcactttgggaggccgaagggggcagatcacttgaggtcaggagttcgagaccagcctggccaacatcatgaaacccccatctctactaaaaatacaaaaattagctgggtgtggtggyacatgcctgtagtcccagctactcgggaggctaaggcgggagaatcgcttgaacccaggaggcggaggttgcagtgagccgagatcgagccactgcactccagcctgtgtgacagagtgagaccctgtctcaaaaaaacaaaacaagcaaacaaaaaacagacacacgacctctctgtacatccttttcctcatctgtaaagaaggaataaccatacctgtcgtgaagggtgggcgggagtgtggcttggctctcacacacaatgagagataactgcagtctttcccttctgaggaaggtaggtagttcctgaaaaccgcttagggcaaattctcataattatcactgatttcagtgggaaaaattgtatgtgttctctaagctcccaaattaatacccatttatttttaaaacaacactgaatcctgttaacatggatactattactttaattgtaaatattggccatgtgcacaacttaataaggcattttcctttcattaccctgtaactcggctctttgatgcttttgtaagctcttttatagctgttaccccctagatgcttaagactcagttctcaaaaagaacagacaaatgaaatgtgatgaatttgtaataccactatcaaggcagaataaaaccctatgaagagcagaaaagattaaagaaatcaatgaaaacaaagcaattgatttcacacgggccaaaagaactggcatcactggaggtgctctctctgccgtaagttagcagagctactgcaggtccagagacaactcagctgcaaagatgccctcatgtggtctcatctctctaccctcagctataaaatctaagttggtttctaaaaatgctcaggattaggtggaatttccaagcccaggtggatgaacctcctgatacaacttgcctgttgtgtttggttggtgttctttgttttcttttttttttttttctttatgttgagatggagtctcactctgtcacccaggctctcaggctggagtgccgtggtgcgatctcagctcattgcaacctctgcctcccaggtccaagcagttctcctgcctcagccttccgagtagctgggattacaggcatgcaccagcacatctggctaatttttgtatttttagtacagacaggatttcgccatgttggcsaggctggtctcaagctcctgacctcaggtgatcctcccgcctcggcctcccaaagtgctgggattacaggcctgagccaccacgcctggccctgattgctgttttttgtttgtttgtttgtttttgtttgtttgtttttttcttgagaargagtctcgctgtctcccaggatggagtgcagtggcgtgatcttggctcaccgcaagctccgcctcctgggttcatgccattctcctgcctcagcctcctgagtagctgggactacaggtgcccgccaacacgcctggctaattttttgtatttttagtaaagacggggtttcacagtgttagccaggatggtctcaatctcctgacctcatgatccgcccgcctcggcctcccaaagtgctgagattacaggcctgagccaccacacccggccctggttggtgttcttataaagcatcaattctgtcctgcaaaacaaatttgcttggcagctcctaagggtcccaggcctgcacactgagcatcacagggatgccacctgagcatcatgacttcaccacaggtgtggtgttaactgaacattcaaagcagaaaaatgatattctaagcttggggcaccagcatccagactgtgggcccttggtgtgtctaagagaatcccagagtcccttggttaaaaggaggcccaccaggcatgccnacccattctattttctgatgcagccccaggaaaggatgaagaaatggccccagcctcgacagaacctcccacccctgaaccccmcatcaagcctcgcctggaggagctgaccgtgacagatgcgacccctgactccctcagcctgtcctggacggttcccgagggacagtttgaccacttcctggtccagtacaagaatggggatgggcagcccaaggcaacacgggtgccaggacatgaggacagggtcaccatctccggcctggagccagacaacaagtacaagatgaacctgtacggcttccacggtggccagcgtgtgggccccgtgtctgccatcggggtgacaggtgantggacgatgggagmcccagggtgggagccatgggagggtcaccctcttgctctttggtgatgactggtggggaatgggaygggtctggtcagcaccacagacctacttgtggctggggctggggctcccattgtacctttttgtgtggttgacccctggctccccctgagcagggaggggccattgggagttttgctgtgctggtggctgtgccaggtcccccacagctgaccctggaatttgtcatgtgtgttagctgtcagctgagcaggaccccaagaatgggcctctctgaactgacctcaggtcccctagtcatagccttggctatttcatatgtcccctagtcatagccttctccctccttttccccacgacgtaagcacatcccccagggaccctgccatcctctctgtgtccctttttctcagctgcagaggaagagacccccagccccacagaacccagcatggaggccccggagccccctgaggagcygctcctgggggagctracagtgacaggatcctcccctgactcgctgagcctctcctggaccgtcccccagggccgcttcgactccttcaccgtgcagtacaaggacagggacgggcggccccaggtggtgcgtgttgggggygaggagagcgaggtcaccgtggggggcctggagcctgggcgcaaatacaagatgcacctgtayggcctccacgaggggcggcgygtgggcccggtgtccaccgtgrgcgtgactggtgagtagtgcttggagtctcggggtaaccacctttccctcatgggtacctggtttactgctgtgccctttcaccaagccctgtgggtccagacttgtctcctgtgtcctgccctccctctgtgccctgtggctgtggcctatgctagcggtttgcttgttcactttggcgtggcctccctctaatggtcaaccactgataacctccaagagtgaaatatgtcaggcgcacaccaagcctgacttacgagaattttcctttctttccatcttaataacagcattctttgttataaccacatacacaaatgcacacaagaggaacaatccaacgtcaaaccacgttgggatgactaaataatttaggcaacatctataaaaagagctattatgccgccactgaaatgttttaacataagacccttactttataatgttacattgaaaaaagagagcctaggctgggcacagtggcttacgcctgtaatcccagcactttgggaggccgaggcgggctgatcgcctgaggtcaggagttccagaccagtctagccaacatggtgaaaccccatctctactaaaaatacaaaaattagccaagcatggtggcacatgcctgtaatcccagttacttgggaggtggaggcacgagaattgcttgaacccgggaggcagaggttgcagtgagccgagatcaccactgcactccagcctggcagatacagccaaactcagtctcaaaaaagaagaaaaaggagcccaaatttttgtaaggatgctaatcacaaccatttgaaagtaacaggcatggcaagaagactggaaagaaacacatcccacgggttgcctgatttgttagatagaatagaatattccagcacatttttttctgtattattctattctgcatagtccaaattttcttaaatggcaaacatttcttttacaatcagggaaagggaaaagagaaaatatataatgtcttctccttctttacactccatctgtcctactcctctatcgctsttgtggcttatttcatttatttccttcttttttttttttgagatgaagtttcgctcttgtcgcccaggctggagtgcaatggcatgatctcggctcactacaacctctgcctcctggattcaagcgattctcctgcctcagcctcccgagtagctgggattacaggcatgcgccaccacatctggctaattttgtatttttagtagagagggagtttctccatgttggtcaggctgctcaaactcctgacctcaggtgatctgcccgcctcggcctcccaaagtgctgggattacaggcatgagccaccgcgcccagccagacttatttcatttctaattatgaggaagttcaaaatttctagtccataagaaattggaggggtggagatcatgaggttaattgaattccaaatgctcagtcaggctgccttttctaagtcatcctcagccaggttgttatgcctggcttagagtatttttcgagaattcctaccgatggggaagaatcagccctgctgagaggcggtctcttgcagggcaggtcgccacctctgtggcaccaagtgaggtgcgagctcatctcccaaaggccatccagacagaggaagcactctcaatcggcatccccgattcctgggggagaggcctcatttccatatgcatgttcagaggaccatctgagtgttgggaaacagggggaatagggaaattattggaaaatgaacattagaaaaattcacattccgggggtaagctgtcctggtccacgttcagttttgtgttcctgtctccactgtggggaaccacagaactgacagaggacaggctgagggacccacccctgcccctcctgttctatgtgtattgctgccccacccccaccccacactctattattaattgttgtagcccagaatttctttctttctttttcttttttttttttttttttgagactgagtctcactctgttgcccaggctggagtgcagtggtgtgatctcagctcactgcaacctctgcctcccaggttcaagtgattgtcctgcctcagcctcctgagtagctgggattacaggtgcatgccaccacgcctggctaatttttgtattttcagtagagaccgggtttcatgatattggccaagctagactcgaattcccaacytcaggtgatccacccgcctcggcctcccaaaatgctaggattacaggcgtgaaccactgctcccagcccagaatttcttttttagcccacgtttttctagtgaaaataatacagcaacattatgtggaaagcttgaaaaacagaaaacaagaatctcatagtcctactttctcycccagctgccggcattaataacaatgtgtgtagtgcacattcccttcctgtattttgcatgcagagcgtgttttaaagttgcaatcagtgttcataaagttcttggcacttccttttttgtacacaagtacattgtaatcattcacctcacggctacacaaccagcattcatcatcgtttcaatggttatttgatgcgttgcggtgaaagcactataacaaaattaatcatcttctacgggtcatttgtgttcctgacacatctgctgtcatgaataaccccatcgtgagttcttccatgctataactttttcctgctttaataattttcttaggacagatgcccagaactgggattattgggtcaaaggaaatgagaattactttggctcctgacactatgtctcagttgccttctggaggtttctaacagtgcagctctgccagcagtacaggccgggggctcggggatacctcaccggctcttattccaagagtcactgaacggcgaacacaaagctgccccagccctcagcctgctctggaggggcrcatttgatgtatgacctctgttgacagcaccagcaaagcaagttgcccttaaacccttaaactctgtatccccctatattacctttcagccccacaagaggatgtggacragacccccagccctacagaaccaggcacagaggccccagrgccccccgaggagcctctcctgggggagctgacagtgacaggatcctcccctgactcgctgagcctttcctggaccgtcccccagggccgctttgactccttcaccgtgcagtacaaggacagggaygggcggccccaggcggtgcgtgttgggggccaggagagcaaggtcactgtgaggggcctggagcctgggcgcaagtacaagatgcacctgtacggcctccacgaggggcrgcgcctrggcccggtgtctgccgtgggcgtcacaggtgagtgagtgtgggtggggcagggttggaagacagccctagaaaatgtgcccttctctaccattttcctatacatatttctgtcttgatggggctcacagtgaaaggaatatagcaacattatggaaagacatgtcatggagagacaggctgcaatccagcaaatgaagcaaaggcgggtgagcatgtgatagggaggcccagggctcaggtcaggaccagacagggacgcctaagtcaccctgcccatgggtacccaggggacagccaggacctgagkccaggcatgccttagcttggtgacagctttagagagaaggtgaagtgtgtcagataatcacagctggtgcaaaggccaggaggctagaaagagcatggcacgtgagaggcactgaggattgagtggggtgtcctttacggtgagtatctcatcctgaagtgtgggagcagaggaggggaccactcaccaggcctggggtctcccagggatgaggatgtggttgcccagrtctgtgctgagatggccccagcagctgtgcctgtgtgaagctcatccgtgggggctgaagatggggatggggtggcagggagcctggaggcagcgaggccagtaggcagttggtggccctggtgagaggtgacagtggctcaaactaggatcggggactggaggtggggtaggaaggtatccaggggaattcagggtaaagatgctctgaggctgctggcagctggtgaggagctggatccaggaacacaccccaggctctggcctcgggaggagtgtgctgagcttgttgcggagcaaagacagaagcccagtgaacaaaagatggcgaagagaccccagtgctgggaggccaggggtgcagaggccgagtggggctgtgctcaaaagagaggcggtgctggagggacagggagaggtggcctgggtgttgggaggtgggggtgaggtgggggctgagggcaggagggtcagggtgagggataggaaaggccacaggagaggagaggatgaagagctgtgctggaggggctgtgggcagcatcgtcctgctcttgggcactttgtgttttgtgacacatcctttctatgctgaactgaggagccagggacctcactgtccccacacgtgtctgtccaactccagaggatgaagccgagaccacccaagcagtgcctaccatgacccctgagccccccatcaagcctcgcctgggggagctgaccatgacagatgccacccctgactccctcagcctgtcctggacggttcccgagggccagtttgaccacttcctggtccagtacaggaatggggatgggcagcccaaggcggtgcgggtgccggggcacgaggacggggtcaccatctcaggcctggagccagaccataaatacaagatgaacctgtacggcttccacggtggccagcrcgtgggccccatctctgtcattggggtgacgggtgagtggatgatggcagccccagggtgggagccgtgggagggtcaccctcttgctctttggtgatgactggtggggaatgggccaggggtccggtcagcaccacagacctgcttgtggctggggctcyccttgggccttcctctgaggctgacccctggctcctcctgagcagggaggggccatcaggagttctgctgtgctggtgactgtcccaggtcccccacagctgaccctggaacttgtcatgtgtgttagctgtcagttgagcaggaccacccagccccaagaatgggcttttctgaaatgacctcacatacccagtagtggccatggtttctccctccttcccttgaagacctgagcacatcccccaggcacctggcatcctctctatatctccttttctcagctgcagaggaagagacccccagccccacggaactcagcactgaggcccsggagccccctgaggagccgctcctgggggagctgacagtgacaggatcctcccctgactcgctgagcctctcctggaccatcccccagggccacttcgactccttcaccgtgcagtacaaggacagggacgggcggccccaggtgatgcgtgtcaggggcgaggagagcgaggtcaccgtggggggcctggagcccgggcgcaaatacaagatgcacctgtacggcctccacgaggggcggcgtgtgggcccggtgtccaccgtgggtgtgacaggtgagtgtttgtgagtgaggaagatggccctagaagatgttgctttctctgcaacttcatgaaaacaaaaatattctcaccagccgggcttcttttgcacgtttccatgcttggggatcttgctaagaggcagattggggttcaacaggtttgggctagggccagagattctgcatttccaacaagaaatgatgcggatgctgctggcccatgatcacgccccttgagtagcaaagttcttcacgacaaaggaattggaccctcttttgaaatctgttgaagagaatttttctgcgtccctgattcctggtagtgtgctttctctgtggagttgactaggggccgtgaaggaagacagaaggcagtgaggggcagcgcgtcgactgcacactctggaagcccactattggaataggaataggaacagacctttctcaccaatgggccaatttgttcattcagcaaagaattccttgccctgatccggacactgtaattttagggtatcaatgtcctctggccaacgacctccagaaactcacctaaaattgaatggatggaattatgctccatgcagtgcaggaggactgtggggtgacttaggaagaggctttagaaagagattgttaaggaactgggcttgtgtttggtgttttaggaaagcatttaaggaagcaaggttttgctctttattagacgctgtcaggaagaagggataaccctattaccrggcgtctcactaagtcttatctttggggaggtcaactagagcaaggccaaagctgccattggtaaagaagcagctatcactcagattagctggatgggtgatgtttggttatttttgtgctttggaaaatgttagagttcatccttactgagacatgatcacagactggccttgttcttgtcttgatccatcctactgacaaatggcctagtctgatgttgatgttccatgaaattgtctgttcaactggaccacgccaagaccagactgtgccaggccagccccaagcagccgtggcctggcagagggaaagggcagctcacgggtgtcagggctgcctttttctttcataggcggaagctggaaagtgacacacacaagttcatgttttcatggggctcacaattgtgggcacaagcagaaaaccggaaagtaagcaaagaaggatgagcatgtggagcccaggagccaagccaggattgggaagggacagtgaagtcactctgcccacaagtacccaggggacagccaggacctgaggccaggcaggccttagcttgatgacagctttggagaggaagtgaagcatgtcaaatcatcacagctagtgcaaaggccaggaggctagaaagagcatggtgtgtgagagacactgaggattgagtggggtgtcctttgcagttggtggatcatcctgaagtgtgggagcagaggaggggaccactcaccaggcctggggtctcccagggatgaggatgtgrttgcccaggtctgtgctgagatggccccagcagctgtgcctgtgtgaagttcatccgtgggagctaaagatggggatggggtggcagggagcctggaggcagggaggccagtaggcagttggtggccctggtgagaggtgacagtggctcaaactaggatyggggactggaggtgggggaggaaggtatccagggaaactcgggggagaggtactctgaggctgctggcagctggtgaggggctgggtccaggaacacaccccaagctctggcctcgggaggagygtgctgagcttgtwgcggagcaaagacagaagcccagtgaacaaaagatggcgaggagacaccagtgcagggaggctaagggtgcagaggccgagtggggctgtgctcaaaagagaggcggtgctggagggacagggagaggtggcctgggtgttgggaggtgggggtgaggtgggggctgagggcaggrgggtcagggtgagggataggaaaggccgcaggagaggagaggatgaagagctgtgctggaggcgctgtgggcagcatcgtcctgctcttgggcactttgtgttttgtgacacatcctttctatgctgaactgagaacccagggacctcactctccccacacgtgtctgtccagctccagaggatgaagcagagaccacccaagcagtgcccaccacaacccctgagccccccaacaagcctmgcctcrgggagctgaccgtgacagatgccacccctgactccctcagcctgtcctggatggtcccygagggccagtttgaccacttcctggtccagtacaggaatggggatgggcagcccaaggtggtgcggkkgccggggcacgaggacggggtcaccatctcaggcctggagccagaccacaagtacaagatgaacctgtacggcttccacrgtggccagcgcgtgggccccatctctgtcattggggtgacaggtgagtgtacgatgggagccccagagtggggcctrtgggagggtctccctttctctggtgatgggtgaactggcccaggaagcccctctgctcttggctgagccatggtacttttttgtctttccccacttccctgaggactgacagatcttcctgggtggagaagggccctgtgagctctgttggtggctgtcccaagttccccagcactgacctcagagcttgtcatgtgtgttgactgtaaactgagcaagaccacccagctccaaagatgggcctctccaagctgaccccaggacccccactcatggccacagcttygctctccttcctcacaagacccaaggacatcccccagggaagctgcctcaccttctctgtcccctcttctcagctgcagaggaagaaactcccgcccccacagaacccagcacggaggccccggagccccctgaggagccgctcctgggggagctgacagtgacaggatcctcccctgactcgctgagcctctcctggaccatcccccagggccgcttcgactccttcactgtgcagtacaaggacagggacgggcggccccaggtggtgcgtgtcaggggcgaggagagcgaggtcaccgtggggggcctggagcccgggygcaaatacargatgcacctgtacggcctccaygaggggcagcgcgtgggcccagtgtccgctgtgggtgtgacaggtgagtaagtgtgagtgaggcgaggtggggaagatggccctggaagacactgctgtctctccagtcttcgtgaaaacatactctgaagagtattccttcctttgtgtatccaaatgcctggagatttttgttaaaaagcagatttggattcagcaggcttggcctagggcaagagaccatgcatttctttctttttctttctttctttyttttttttttgagatagagtctcgctttgtcacccaggctggagtacagtggctcaatctcggctcactggaacctccgcctcctgggttcaagtgattctcctacctcagcctcctgagtaactgggactacaggcgtgcgccaccacgcccagctaattttttcatatttttagtagagatgggtttcaccgtgttagccaggatggtctcaatctcctgacctcgtgatctgccctcctcggcctcccaaagtgctgggatcataggcgtgagccacggcgcccagccraccatccatttctaacaagattctcatctatcttgatgccactggtccaaggaacacactttttttgttgttttttattgtagtaaagtacacttgacataattcgccattctaatcgctttctagtttgcagtccagcatgaagtccactcacattgctgtggactgtcaccctcyacttccagaactcctcttcccasactgaaacttcctacccactagacacgaactcccattctccccttgccccagcccctggcaacaccattctactctctgtctctatgaatttgactctaggtacctcatataagtgcaatcatacaatatttgtcttttttgaatggttcatttcattaaatacaatgtctttaaggttcatctatgtcgtagcatcagtcagaatttcctttttattttattttctgtggcaatgggggtctcggtatgttgcccaggctggtctcaaactcctggcctcaagcgagtctcccaccttgacctcccaaagtgctgggattataggcaagagccactgcacctggccagaacttccttccttttcaggctgaataatgtttcgttttacacatacagaccacactttgctcatcctttcatccattgatggacatctgggttssttccacctcttagctatcaagaataatgctgctatgaatatttgtgtssaaatcacagaacacctttgtagcaaagctcctcccagtaacagatttggaaactctcttagaatttgttgaagcgaatttttcttgcattcatgaatcctcacagaggttaggctcagagttagggttcctgtcctaatgggaaaagttcctgtcctaatggggctaacgtcatgggggacaggctgtggaccagtaagaaagcaaaggcgggtgagcatgtgacaagaagcccagagccaggcaggaatacctaaaccaccctacctgtggatactcaggggacagtcaggatctgaggccaggcaggccttagcttggtgacagctttagagagaaggtgaagcgtgtcagatcagcacaggwggwgcaaaggccaggaggctagaaagagcatggtgtgtgagaagtactgaggattgagtggggtgtcctttgcagtgaatagatagtcctgaagtgtgggagcagaggaggcctggggtctcccagggatgaggatgtgattgcccaggtctgtgctgagatggccccagcagctgtgcctgtgtgaagytcatcygtgggggctaaagatggggatggggtggcagggagcctagaggcagggaagccaataggcagttggtggccctggtgagaggtgacagtggctcaaactaggatcggggactggaggtkggggaggaaggtatccagggaaactcgggggagaggtaactctgaggctgctggcagctggtgaggggctgggtccaggaacacaccccaggctctggcctcgggaggagtgtgctgagcttgttgcagagcaaagacagaagcccagtgaacaaaagatggcgaggagaccccagtgcagggagggtaagggtgcagaggccaagtggagctgtgctcaaaagagaggcggtgctggagggacagggagaggtggcctgggtgttgggaggtgggggtgaggkkggggccgagggcaggggggtcagggtgagggataggaaaggccgcaggrgaggagaggatgaagagctgtgctggaggcgctgtgggcagcatcgtcctgttcttgggcactttgtgttttgtgacacatcctttctatgctgaactgagaacccagggtcctcactgtccccacacgtgtctgtccagctccaaaggatgaagccgagaccacccaagcagtgcctaccatgacccctgagccccccatcaagcctcgcctgggggagctgaccgtgacagatgccacccccgactccctcagcctgtcctggatggttcccgagggccagtttgaccacttcctggtccagtacaggaatggggatgggcagcccaaggcggtgcgggkgccggggcacgaggacggggtcaccatctcaggcctggagccagaccayaartacaagatgaacctgtacggcttccacggtggccagcgcgtaggccctgtgtctgccattggggtgwcgggtgagtgaatgatgggagccccagggtgggagctgtgggagggccacctcttgctctttggtgatgactggtggggaatgggacaggggtctggtcagcaccacagaactgcttgtggctggggctgggactccccttgggccttcctatgtggttgacccctggctccccctgagcagggaggggccatcaggagttttgctgtgctggtggctgtgccagkycccccacagcygaccctggaacttgttacgtgtgttagctgtcagctgagcaggaccacccagccccaagaatggacttctctgaaatgacctcaggtcccccagtcatagccttggcttctccctccttttccccaggacccaaggacatccccctcactctctctccctccttctccactgcagaggaagagacccccagccccacagaacccagcactgaggccccggaggcccctgaggagccgctcctgggggagttgacagtgacaggatcctcccctgactcgctgagcctctcctggaccrtcccccaggkccgcttcgactccttcaccgtgcagtacaaggacagggaygggcagccccaggtggtgsgtgtcagggkcraggagagcgaggtcaccgtrgggggcctrgagcccgggcgcaaatacaagatgcayctgtacggcctccacgaggggcagcgcgtgggcccagtgtccaccgtgggcatcacgggtgagtggggggacaggccctcgtccccaggtttacctctgcagcccccttgtgtttctcctttggatcttggcacctcttttgactgggcctctaggtttctgtcttttctcccatgttgctaatgatcctgcctcatccttggattcatggagactgtgtggagtcagatgggcaggtagtccatgccctgtttgttgtagcttccttctcccattgtgatctggaacctccatgttgctcgtgtgctcatttgttagtcttcaggctcccttaaggagtattttagtggctcagaaagtgcttcagatccagctgcccagatctgcatgtgccttcgaatgtagtgattgtgcgactttgcaggcgtttcctaaccttgwgcttcagattcctgcaaagttggggtgatgataataatggcacccacttcatatgttgtgcgagggttaaatgcaccactgtttgtgagctgcttacagcaatgcagggcacagattctaaaacaagcgttttagaggaggccgctaagaaatgctcactccagtcctgggagagcactgcctcccttgcgcagggtcctgcctcctgacccatgggcctgctctgctcttttcagcgcccctgcccacaccactgccggtggagccccgcctgggggagctggcggtggmggccgtgacctcggactcagtgggcctctcatggacggtggcccagggcccctttgactccttcctggtacagtacagggacgcgcaggggcagccccaggcagtgcctgtgagcggagacctccgagcggtmgccgtctcggggctggwmccggcccgcaagtacaagttcctgctctttggactccagaatgggaaacgccacrgcccagtccctgtggaggccaggaccggtgagtgagggctggaggcctcccgcggccagagccttcgcccccttgtggcacctgttggaatttcacgttctgtgccccacactccagtcctcagcacccactgatttattgggtccaggaaaacccaggccctgagctctcctctcccactcacactcatccctctccctactttccctgcaccccaggggacacttgctttcttgtctggctcctcttttattcctactcctggcccagtcaccctcccgttcctgggaccggctcacagagccatagcagcccaggaagctccgtggcccctttgcctccatcccactctccatgcacctcactgtcttttccagccccagacaccaaaccgtctccccgcctgggggagctgactgtgacagatgcgacccctgactccgtgggcctctcgtggacggtccctgagggcgaattcgactccttcgtggtccagtacaaggataaggatggtcggctccaggtggtgccggtggcagccaaccagcgggaggtcacagtccaggscctggagcccagtaggaaatacaggttcctgctctatggtctgtcaggcaggaaacgactgggccccatctctgctgacagcaccacaggtgagtcccagtccagcctccaccttttccagagctgcctctcatccgagccctcagagctggccctgcagccttcccgtgagattccctctatcagccctgacacaaccatcttaactccgaaagtgagtccctctgtgtgtcaggcacagttctgaagcatatgcattacttcctttcattcgctgactgctgaggaaataaaagggacacgggctttggggccagcagatctgtgttccagttccagtcctagcctttgccagggtgaccatggacaagccgcttcatccccgggacctcagtgtcctcacctgcataatgctgggaatggcgctggactcagtagtggttcccatcctcctccctcctccctgactcggagccgaggggtggaagaaaagggagggcttggctatggaaagacgatggaaaaacctggtgtcactatgcctatgactcagctccctgaggaaggggtgtggtgggtcaccgaccctcaccccactcccaggaccatgagtcactatgcccagaggaggacagagcagccggccagtctgggcctgggtccctgggactccgtaattctcttcccaaaccctcactgtggggacggggtacagatccccacccatcggccccagccccacccgggcaagcctctgctctgccctctgttytcccagctaatcccctgtcttctccctgccccaccctggctgccccggcccagtggggtcagtgtggggctggggaagcaggaggcacggatgttcaggctgatggccacaaggggacaagggggagatcacagcctggcagtgatgggagccgtgcattggccggctgcccagaccagctctcgatgtttggggtgtctccgtgacaacccagagacctccggggagtctctctcagctctggcctcattcytgctcaggggctgggggtcagggtaaacaaaggccctctctgcacccccagccacccatccctcgggagatgatctgtaatgaatttggcgcatcctcgatcacagcagggaaggggcrgggcaggaaggagtttgggcagcagcctccagaggaggagggggctgttctccctcattcctgtggggcatggcgggagcaggcctgtgtgtctcctcaaggagctgtccctggggctacactggagggaccatttcccagaacctcacacctccgggaggctgccagggcttaggcaaaggcagcatgtgactaagagctttccctcctccctctgcacagctcccctggagaaggagctacctccccacctgggggaactgaccgtggctgaggagacctccagctctctgcgcctgtcctggacggtagcccagggcccctttgactccttcgtggtccagtacagggacacggacgggcagcccagggcagtgcctgtggccgcagaccagcgcacagtcaccgtagaggacctggagcctggcaagaaatacaagtttctgctctacgggctccttgggggaaagcgcctgggcccggtctctgccctgggaatgacaggtgaggctgctgtgcctggctatagcaagccagcttgtgtgggtttccttgtgcatttgggctgaagacaaagatgactgcaggagtgggcaggccggagtggggcgccctggcctgtscccaggaaggaggaggagtctgcagccctgtgggcttcaacatccatcaaggagtccagagcaggagccaggccaggcgggagggaaaggccctgggaggggctctctaatctcccagccccgactctgccccgtcactgccrctgctcctcattactcgctggggctgctgtcgcctccccgaagggtggccttgtccagatagyggcaaacctccctgccgtggatgagtcaggagcattttcttaagaggaacatcactggaaaacaaaatgagcggggacacagaaaccaacagcagtggctgcatttgtggtacaggctcctcttccrgagctcgctgatgcccacctcagacaggcctgaccacggcacggctggtgggatttgccagtcacctcaaccagccagttccaccctcagcttctctcagaagggagcaccacactcctcaagctcagtgaatgtatcccggcatgggtggggccagagcctgtgatatctcgaggtgggctcggcaggacaccggggtgtggaagggggaagcgagcacctgactcagacagcgcgggagctcgcaggagtcacgaggccacagcgacttcattgtctgactgggcctggacctataaacttcccacctcagccttgggccaagcmtggaagataaaaatggagcaccccatggcgcccctcactcagattctcccctgggcttctcccacgcagccccagaagaggacacaccagccccagagttagccccagaggcccctgagcctcctgaagagccccgcctaggagtgctgaccgtgaccgacacaaccccagactccatgcgcctctcgtggagcgtggcccagggcccctttgattccttcgtggtccagtatgaggacacgaacgggcagccccaggccttgctcgtggacggcgaccagagcaagatcctcatctcaggcctggagcccagcaccccctacaggttcctcctctatggcctccatgaagggaagcgcctggggcccctctcagctgagggcaccacaggtaccaccaggcgtctccggcctctagcctaggactcagaagggagaaacgggggctcagaaggggtggtcgcagggaaagagcgtgaggcgggtaccagggagagaggatggatgggctggatgcgagtggcctttagctctgccccacaggacccccctgtggctgcaagtccctggttacagatagagaaacrggggcagggaggggggtggaagggacgtgctctgggtcaccaagctggtgtgcttctgtctccaatcccttctcccccacccactccgtgcagggctggctcctgctggtcagacctcagaggagkcaaggccccgcctgtcccagctgtctgtgactgacgtgaccaccagttcactgaggctcaactgggaggccccaccgggggccttcgactccttcctgctccgctttggggttccatcaccaagcacwctggagccgcatccgcgtccactgctgcagcgcgagctgatggtgccggggacrcggcactcggccgtgctccgggacctgcgttccgggactctgtacagcctgacactgtatgggctgcgaggaccccacaaggccgacagcatccagggaaccgcccgcaccctcagcccaggtaaggacccacacacactctgccccaaagtgggggtctttgtacttcacgggggggacctagtgcctcagccagcggtgggggtgggcgagttggtggtgggcctggaggaatctgcagagcgacttccattcctggggactagaggaaaaggggtggtgagcctgtgctggagcagaggcgagggggggactcgyagggagragcctccctgcccctgcctgcgtcattgttccttgacccctctgcagttctggagagcccccgtgacctccaattcagtgaaatcagggagacctcagccaaggtcaactggatgcccccaccatcccgggcggacagcttcaaagtctcctaccagctggcggacggaggtggtgcctttgccatgtgctcatcgcctcgcatttcctctcccccctgcactctgcccaccctccagcygccctggggttccctgggtaaccctcgatccccaaygttttcaggggagcctcagagtgtgcaggtggayggccrggcccggacccagaaactccaggggctgatcccaggcgctcgctatgaggtgaccgtggtctcggtccgaggctttgaggagagtgagcctctcacaggcttcctcaccacgggtgagatggactgggacccggggcaagaggtgggagycaagaaaayggcatgggtgggagttgagagagaacgaggagggtgaaagggaggtggtggaggctccrattgcggacgggaggccagtggagtctggggaggcacggagtagagagagccrcggggacccytctgagcccctccccttcccccagttcctgacggtcccacacagttgcgtgcactgaacttgaccgagggattcgccgtgctgcactggaagcccccccagaatcctgtrgacacctatgacrtccaggtcacagcccctgggggtgagcaggsctgaggcytctggaggggacttgttcagggtggggattgcaggggggaggctggactctggccgaggatggagggggsaggccttgatgcccctctctacactcccagccccgcctctgcaggcggagaccccaggcagcgcggtggactaccccctgcatgaccttgtcctccacaccaactacaccgccacagtgcgtggcctgcggggccccaacctcacttccccagccagcatcaccttcaccacaggtagggtctgtggggtgtgtgggacagggagaggaggtagagggagccaggttgggcctcatccccatctcctcttcctgctttccctcctagggctagaggcccctcgggacttggaggccaaggaagtgaccccccgcaccgccctgctcacttggactgagcccccagtccggcccgcaggctacctgctcagcttccacacccctggtggacagamccaggtgccccggccccactgacccaactcccctccctgggtgattccaggaggtgctgcctctggccctcccggagggtctccacctccctctcccctgacccccccttgtctgtcccacaggagatcctgctcccaggagggatcacatctcaccagctccttggcctctttccctccacctcctacaatgcacggctccaggccaygtggggccagagcctcctgccgcccgtgtccacctctttcaccacgggtacctggacrcacgggcccggggccgggggctgggtgggcagccagggcctaaggcttggaaaaggactggcccctgctctcctctcccaggtgggctgyggatccccttccccagggactgcggggaggagatgcagaacggagccggtgcctccaggaccagcaccatcttcctcaacggcaaccgsgagyggcccctgaacgtgttttgsgacatggagactgatgggggcggctggctggtggrtggcattgggaagcccaggggtctgtgcagggcagggkctgttgccccgggagccagaggctgatggtgcccccacttgcttcccaggtgttccagcgccgcatggatggacagacagacttctggagggactgggaggactatgcccatggttttgggaacatctctggagagttctggctgggtcagtgcctcacagggactggggaastacggatggggatgggggccctgtggacaccaggaccctgatgaggscacgtatcccacccccaggcaatgaggccctgcacagcctgacacaggcaggtgactactccatscgcgtggacctgcgggctggggacgaggctgtgttcgcccagtacgactccttccacgtagactcggctgcggagtactaccgcctccacttggagggctaccacggcaccgcaggtaagcagaggctgtgaggctgggagggtgaggctgggaggggaggccctcatggctccttcctccaccctgcccaggggactccatgagctaccacagcggcagtgtcttctctgcccgtgatcggraccccaacarcttgctcatctcctgcrctgtctcctaccgaggggcctggtggtacaggaactgccactacgccaacctcaacgggctctacrggagcacagtggaccatcaggtgaggggtggggaggyggctcagagctggggtggctggggctcggcctgcctaggtttcagccccacagtgtaacaggcaagggactgagyggctgggtgaaatggaacaatcatgccagcctcgcagagggagctggagttgatttattggctggaaaggrccagctcagaattaagcctcaatcctctgcagcggagggtcaggaagggagctctgcggggaggttggttgagtgctgggagctacctccttaaggggaaygggargagcagatgggacatccggctttgactctctcttgacaacccctttcccagggagtgagctggtaccactggaagggcttcgagttctcggtgcccttcacggaaatgaagctgagaccaagaaactttcgctccccagcggggggaggctgagctgctgcccacctctctcgcaccccagtatgactgccragcactgaggggtcgccccgagagaagagccagggtccttcaccacccagccgctggaggaagccttctctgccagcgatctcgcagcactgtgtttacaggggggaggggaggggttcgtacrggagcaataaaggagaaactgaggtacccggctggcatcggtcctgccccatcactggctctggcccgggctgtgggcccccatccccsggggctgcagccgcacttggaaaggctgcatcttgaggatgacactgcagtggggcaggggctgcagggagggcagggcgtccccggaggrcagcagcgtgaaggcctgcagcagtcgggtcagcaccacgaagagctccaggcrcgccagcggctcgcccargcacacgygggcacygcagccgaaggccagagctctggagttcttgcctggctccaggaagcratctscgggcgggtggacaggtrrgtggggaggcgttcagcggcagcggggaccagcctccaccacattttcacggcaggcccccggccccccacataccaggcyagaactcatgtggcctctcccagaccgtctcatccaggtgggcgccttggaggttcggaatgatgactgtgccctcagggatgtcgtagccrgagatgctgaagggggctggagttagaggctggccaggacctccctgggctcgggctttcctcactcatccccaaccctcgggagtcacctgctgggccgtgtggtgcggtggggcaaggctaagggcacaacgggcbrcaggyrcagcacctcggcgatggtggcattgagcaagggcagccrtgcayggtccttgtaggggacccgggagctggaggcaccagggcccagttcgtggtctagctcctcctrcaktcrctgctgaatctggggaatgatcgggtggagtcctgccccagcagcccacagctgcccagcctccagccgctccctcagcaacccagtgagcctgagtgccggtgaggcaagcacagccccagccgcacagtgctcagagctgagtgagggtgcccaccgccctggccaggttgctgggaaggagccttttgcttgtccccaggacgcacctcagggtggtgaagcaaaaaaaccacggcccaggagagggtgtttgctgtggtctcagtgccachgatcaggaggtccactgcagccatgtgcmvgtgcccttccaggagctgtccrgagccctcttccatgstcrgctgcgccaccccttrgrgcatgtagtccatcatgtccctccactggcctgccacsaggctctcctgcagagggtgaaaggagcgggctgagcggctggcctggggagaggagtacagagtggcaacaggcccataactggggtatgcaaaagaacccgcctcatagcaatgctgaggccggtagcatcactggctgtgggccgaggggaggccgtccacacacagtccccaccttgtgctgcctcagctgcwtctccwcgatgtgrtccctcttctctatggcctgcttcarcctccggagacctggattggggaagaactgcggcaggaagcatgagaatgcagctgtgggaaggagcctctccctccaccccagcctctccccyacaayccaggggtgtctaggctccaggtcctcaccctgagaaagggaatcabgtccacaatttggatggaccagtggctccaggtttttaacacctcctggatacatttgtaataggcaggcattaagttgtcstcctgccagraaaggakggagtactttcagttcaggacaaggagaggctcagggaggggctgggggtgggcctgaggggctgtgaggcaccttgatcttgtctscgaaggtgaggtaacagwtgatgctgcaggtgaggagagagaattcctcctcaatggccacaggggtgccgggctgggctctcatgcgctgtggagaaacagtgtgagttcagcaggccgctgtgcagcgggcagggcgggggctactgtgagaggcgaggctgacccgaggtggcctcaggagcccagccttacctcacagaactcctgggtcagctgctccaccactggctccatggagtcacggatgcccagcagcagggctgagcgggtgagcttcttgtgggctttccagagcagggagtagtctcccaaggamaggtcsgggtagttcytagacaccagcttgtctgcaggaggagttgggggctggagggtgggaactgatgaaggcagctgagggcctgaccttcttcggcctccccaacccctgctttctccccaccagatatgcccccccaagagcttccagggacctggattggggatgccccaaaggtggctcacacttgaggctgaggtgggaggatcatttgagactaggaatttaagaccagcctgggcagcatagcaagaacccatctcttaaaaaaaaatttttttaagaaagaaaaaatgcccccagcccttacaggtaagtggctcaggtctgccagcaaagtctgcccactttttgaccatggcttcctcaatggtcctctwggagttcagcaccaccacatctgggagacagccaaagcagcgtcagcggagagaggaccctctccgtcacctccgccccctcctatggtgagggccagagcgagatcagcctctcaccttgcagcycaaggwggagcctgtagatgggcccgaatttctgagtcaggccaagcagatagatkgggaggtcgggctgcagcargtgcaagaagcccrgggcaagaggcdggaggtggaggctccggagcttycaccagttccacagcaggcgggygccagccagcaggggcagcagcagcagcaggcccaggagcagcatggcaagacgcccgtcagggccctgaggtgccacttatagctcaagagccccagccatccctcctgctgtgtagactgttttggggcctcccttgaccccaccctcaggtgccttcccaccgacccacccacagagtggcccttttctggaatgacaccagtctcattggccttgggacgtccgtatttcaaaaaaaattaatcacccatcgagaagcaaggaagggaaatgcaaccctgacctttttcctgcatccagagtcagctttctggttccacatcacccgtgcaggcaagggtgtccgccccgacctgggccctctccctctgccaccccaccgtgggccagtttactggcatgatgtttgtctcagagagaaaatggcagtccctgcctaataggccttcctgaatcgcctgaagaacaaaatgtgatttgtgtgggtttgtttgttagtttaagctacagatagagtaatacagtttaagcctggtttgcctggggcattccagtatatacaggtatcccagtgtgattgttattagtgcctcctttcactcacaaaagtgcccagaagacaaaggaggaagtggtttcccgctgcggagtaatagcatgtaccagacactgctctaagtgctttgtgggcactcactcaactcttcacagccatgctctatatgcaacacgggtattgttcgcatgttgtggagggcaggattccagcctggaaatctagctgtcgaatatgtacctttagccaccaggagcacctttctttggttgaaaggaaaacagcccaccttgagctggtttgagataaaaaataagaattggggaatttcacagaactcaggaaaaagaagcagaggaggggaccccactggtcttagaaagtcaaggatagggaacagaaaaagccccggagacgggcggtttcctcgctctgttcctctctcctctttcttctctctgcagtcaagtttcttgtgtttccaggcacaggcagaacatgactgccctcaggactacagtccacaggttctactccagccagggaaagtatggattcccagcacaactgggcatgcccccctcaaagtccaaagtccccaggaaggggctggatagccacagctggatcaggatcaagggtccagccctatttggggaactgaagccataaggggtgggggtcccactggactgacactcagagaccacttttgtgggtaaggaggcagtttggggatttgggaagaggccatgccaaagaggagtggccgggttcagtgagaggccagggcctcctggatggtacctgagaggtcagaggcgacccagccccataccttcccccccatttctggctctgtgccagaccctcggaccagtgggggtctctctcccctcagagcttttccagactgtgctactgcagagccagagtcaagaccctggctgtgccacccactacattggcgagttcgctgctgctgaatccatgatcaggactgagagggagaaaacaggattgggatttctggggttgggcaatgacagctactgccttcttcatggttgacctcccagaccgggccatgtcttgctgcaactgaatccctggctccggaaaatgggcttatgccaccaccatgctgagcagctactgggagaaagatctgatgagcaaccatagggccatgtatgcaagagcctcaggaaacctctgccacagtgggaaaggcccaaacttctcaaagttacgtgggataagacagtgctcatcggaaaggagcgcacctggaaggctgacgtgcttactacttgtctcaccatctccatctcttccaccacttccaaatccaaactccgaatgtggtcaattacatgcaatgtccccaaaggtaccctgtcctgcccccggcctctgggcctttgtatattctccttctgccccagatgccctcatctacccctgctctttgcctggctccttctcagtcttcagagccccacttggaggccacctgctccaggaagccttccctgtccctgcctggcaatgcccctgacttggttagatgccccacaggaccacactgctccctgacatcacatctttcacagagggtggggactgcccgtcctcttatctgtctccccagcgatgagccctggagtgagcagctgtatctctggcacctggcacagggcatggcatgaagtgaaagattcccgaatttctgtcgaatgactggatggcaggctgctgaactgtcatgacctctacggaaactgatctcaccaaacttctttggacagacgcggagtcatctctgaagaccccaggtgtgccactaaatgggggaaagttaggcaggtccggtgggaaggggagaccccaggagaacagcggcttcctcagaggattcacaaacacaccaaagtcagacttttggcttgtttgaaaccagtaactggaagaagacactgccggacctgaggattgcacaactccgggaaagtcacctcattccactgataacagaaccaagcgtcagcaggctttcaacagcccggaactcagctaaaatctgcagacctcagaaccgccagcagcacgaggacagagtcggggaggtgtagctggacaacagctcatgaggcagaagagctgtgtcacaggtgtcagctgagcacaagccctgtctgaggccrtggtgactggcgacagccrggcagtggagggccttggaagctgaagggtggtcttggcatggactctggtccttggggtgcaggctcttgggtcccagttctgctcggggtggtcctgtgaagcactagactcctagcgggtcatctgggaggttctagcagagctgaacagcccaagggtcatcagggctcagagagtctaaggttatgtcaacctggcctgcccagaactgcatcgggcaggggcactgctctcagccctagcaacacacactgacacttcgctgccaacactgacactttgctgccaaaagcctttaatatgccctggtcccaggctgtgttcatgaaagcggacacagcagtgcttccagcttcatggttcccaggttcaggttcctcccagcggaggtgggagggcagccctcacacctggcacccctgagtgccatactcctggaggaagtcgttgagctgggcacaggctgcccgctggcgggtgctccggcacaggcgttcagagggcatctcctcgatccagctattcr

SEQ ID NO: 94490 - DNA, 30184 bp, Homo sapiens
aattattgattatgtcaacaacttcctattaggtttctttgcttccagcctctccctgtccaatttatcccccagactgtagctagattctccatggtctaaaacatagcctccccatataccactgtaatcttttttctttcttttttccattaatttttttttttgtattttttgtagacatggggtttaaccatgttgcccaggctggtctggaattccagagctcaggcaatccgccctccttggcctcccaaagtgctggggattacaggtatgagtcactgccccagtataatcttaaataaatgggtcatttcttttagtctgtttctctgtaaagtgagctaatttttgtatttttagtagagatggggtttccccattttggtcagactgatcttgagctcctgacctcgtgctctgcctgccttggcctcccaaagtactgggattacaggcgtgagccactgcgcccagccttcaatagttttattaagtcctagaatgttaagatgtttctcatgtcactgtcctatttccagactttaatggcttcccattaaccacagttcagggtctatacttcttagcattcaaagattgtcactctggtggttttaccccttccgaaccataggattctgattccctgtgtgatctccttatgaatacagccatgccttttccccatctctttaattttaatttttttttttgacatggagtcttgttctgtcacccaggctggagagcagtggcgcgatcttggctcactgcaagctccgtctcccgggttcatgccgttctcctgcctcagcctcctgagtagctgggactacaggcacccgccacgacgcccggctactttttgtattttttttagtagagacgggtttcaccgtgttagctaggttggtctcgatctcctgaccttgtgatccacccaccttggcctctcaaagtgctgggattacaggcgtgaaccacctggcccggccccattttaatatttttttgggacgggtcttgttctgtcacccaggctggagtgcgatggtgcgatcatggctcactgcagcctcgaaatcctgggctcaactgatcctcacgcttcagcctcctctgagcagcttggcctacaggcatgtgccaccatgcccagctaattaaaaacattttctttctctttttggagtggcagtattgttaccagaaaggggtcctgatccagatcccaagagagggttctttggcctcgtgcaagaaataatttgaggcaggaaaaaaaaaattcaaggtgaatccataaagtggaagcaagtttattaagaaagtaaaggactaggccgggtgccatgcctcatgcctgtaatcccagcactttgggaggctgaggtgggtggatcacgaggtcaggacatcgagaccatcctggctaatatggtgaaaccccatctctactaaaaacacaaaaattagctgggcgtggtggcgggtgcctgtaatgccagctactcgggaggctgaggcagagaactgcttgaacctggaaggtagaggttgcagtgagccgagatcccgccactgcactccagcctggcaacaaagggagactccgtctgaaaaaaaaaaaaaaaaaaaaagtaaaggaataaaagaatgtctactctacaggcagaggggttatttcttgattatatgctaaacaagggtggattgtttgtgagttttctgggaaagggatgggcaatttcccctctcccccagttgagtgctcctcccctttgtagaccatatagggtaacttctggttgtttccatggcatctgtaaactgtcatggtgctgatgggagtgtcttttagcatgtgaatccattatagttagcatataatgagcagtgagggtgaccagaggtcacttttgttgccatcttggttttggtgggatttgaccggcttctttaccactgtttgatcaccaaggtctttgtaatctgtgtctcatgttgatctttttttttttttttgaggcggaggtttgttctgttgctcaggctggagtgcagtggtgcgatctcagctcgctgcaacctctaccttctgggttcaaacaattctgcctcagcctcccaagtacctgggactacaggcgcgcgccaccacgccgggctaatttttgtatttttagtagagacagagtttcaccacgttggccaggctggtctcgaactcctgatctcaggtaatccacccacctcagcctcccaaagtgctgggattacaggcatgagccaccgtgcccagcccttgtgtcgatcttctatctcatcctgtgactaagaatggctagcctcctgggaatgcagcccagtaggtctaagcctctttttacccagcccctatttaagatggagttgctctggttcgaaagcctctgacagtatcttattatactgtgtaggctggtcttgagctcctggcttcaagagatcctcttgcctcagcctcccaaagtggtgggattacaggtgagagccaccatacctggccctttccctcatctctaattcctggcaaccactaaactagtctatcctctatgtctatacttttgttattaatatttcacaaatgttaaatgcaataatacaatagataactttttatgtttggcttttcttcagtcagcataattcccttgaaatctatccaagggaattatgtatattgcatgtattaatagtttgttatttttttctattgttgagtagcattccacagtatggatgtagcatagtttgtttaaccattcacatgatgaaagacatttgggttgtttccagtttttggttattacaaataaagctgcaatgaacatttgcgcacaggtttttgtgtgaacagagcataagttttcattcctgttggataaacgcccaacagtgcaatggctgggtcatatggtaagcacatgtttagttttttaagaaactatcggccgggcgcggtggctcacgcctgtaatcccagcactttgggaggccgagacgggcggatcacgaggtcaggagatcgagaccatcctggctaacacggtgaaaccccgtctctactaaaaatacaaaaattagccgggcatggtrgcgcgcscctgtagtcccagctacacgggaggctgaggcaggagaatggcgtgaacccgggaggcggagcttgcagtgagtcgagatcgcgccactgcactccagcctgggcgacagagcgaaactccgtctcaaaaaaaaaaaaaaaaaaaaaaaaagaaactatcaaactttttcagagtggctgtacaattttatattcctaccagtaatgtggatccagtttctatacctccttaatagcgtttggtgtatcactactttcattttagcattctgataggcatgtagtaatatccgattttggttttagtttgaatttccctggtggctaatgatgttgaacatcttttcatgtgctttcttgcctctgtatatcctgttcaatgaaatgtctattcatgtcttttgcccattttctaattggatttttttaacctgttgagcgttcagagttcttcaaatattcaaaccttcaaatgaagagaaggcctttatctgatatgtggtttggaaatatttccttccactctagcttgttttttcgtcctcttcaaaaggtctttcacaggacaaaggttttaaatttcttttctgcagggcacagtggctcacgcctataatcccagcactctgtgaggccaaggtgggcggatcacctgaggtcaggagtttgagaccagcctggccaacatggtgaaaccccgtctctactaaaaatacaaaaattagccgggcgtggtggtgcacgcctgtagtcccagctactcgggaggctgaggcaggagaatcacttgaacgtgggaggcagaggttgcagtgagctgagatccgccaaggcactccagcctgggtgacagagcaagactgcatctcaataaataaataaacaaataaataaataaaggccgagcacggtggctcatgcctgtaatccctgcactttggtaggccgaggcagatggaacacttgaggtcaggagttcgataccagcctggccagcatagtgaaaacccgtctctactaaaaatacaaaaattagggccaggcgcggtggctcatgcctgtaatctcagcactttgggaggctgaggcgggcggatcacgaggtcaagagtttgagaccaacctggccaacatggtgaaaccccgtctctcctaaaaatacaaaaagtagccgggtgtggtggtgggcacctgtaatcccagctgctcggraggctggggcaggagattcgcttgaacccgggaggcggaggttgcagtgagccgagatcgcaccactgcactccaccctgggcgacctggcaaggctccgtctcaaaaaaaaaaaaaaaaaaagaaaagaaaataccgggcgtggtggcagacgcctgtagtcccagctacgcgggaagctgagtcacgagaatcgcttgaacccggatggcggagtttgcaatgaaccgacatcgtgcaactgcgctccggcctgggcgccaaagcgatactcggtctcaaaaagaaaaaaaagaaaacaggagaataatgaaattttacttatttattttatttattttttatttttttgagaccgagtctcgctctgtcacccaggctggagtgccctggcgcaatctcggctcactgcaacctctgcctcccgggttcaagcgattctcctgcctcagcctcccgagtagctgggactacaggcgcctgcaaccacgcccggctcatttttgtatgtttagtagagacggggtttcactatgttgcccgggctggtctcgaattcctgagctcaagtgatcctcccgccgctgctttccagcgtgctgggattacaggcgtgagccaccgcgctcggccaaaagttttaaatttcagtaagttccaatttatcaactttttccctgtatagattggtcttttggtgtcgtctaaaaactatttgcctggccctaggtcctgaggattttttttaactttttttttccccataagtgatttattgttttacatttaaatctatgattcattttgagtaaattttgtataaggtgagaggtttaggttgaggttctttgggtctatattcgtccaattgctccagcatcatttgttgaaacggctcctgattccatttttgtacctttcccccgttcatttccccttagagcagtgggaatgtttttttgttagtgatgatgtcatgccttgtgcaaaatctgtattagcatctcacaacataagatttggctctattctaacggcattttccaccactcgatgtccaccgtaatacttggctctcgaagaatcactgggctggctccctcacttcatgcaggtctattctattatcacttactcagagatttctctggccttttcttcacagcacttacaaaatgcgatctattacatattaatttgcttatttgcttcttgttttcctatactcccatccctcccagaagctccaagagagcatactgttttatccctagggcctagaataatgcgtccacgtagtaggtactcaaaattttttgcttgacaggctagaaaaggtgaataaacacaaagcgggagcgaaaagtctacttctaggtcaggcactctttggacttcacgcaacgtgtgagcgccacctctcgggaagccaatttgctcgcgaacgaaggaagtgagtcagagaacccgggggtggagagaagaaagcaagcagctaaccggaaaggtctgaaaaagctagcgccggaagttaaactgcagaaagttgttccctagaatgactgcctactcccaagaggaagcgtgggcgagcggtgttctgcaaaatgggctctccggcagcggatctgcgcagaagcgttccgtgcgtgcaagtgctgcgaaccacgtgggtcccgggcgcgtttcgggtgctggcggctgcagccggagttcaaacctaagcagctggaagggtaagaggtgttcgggatcctgagaggaaaaagaaaggagtgtagtcgcgggagtgggttaggtgaggagttagtgaagagatgagttcagctctaagaggcggcgaggaggatcggatgggaggaggggcagggagcgcctgtggacaagtgcagrccggtcggcgcacgtcccacgccacgtggactcgcctttgtcggtggccgcctttctcgtcaggccgcgacgacagggctgtgccttatttgtgtctgtcgagagcagtgccgggcacggagttggcgctctgtaagtgcttgctgaataaatgacgggtgtgtgtgtcattcattcagcaagcrctgagtgcttactgttgtgtcaccgggaccgatgtggagggacatttttagggtgtatttctggcgctttagtcctgttttctcctggrcaatttatgcttgccccgcaccccatcgtgcgattctccgcagtctttgggctttgtctctctctytttttttttttttggaagttgcagaatggtgataaatgattttctttgctcctattgactgctasgccctgtggctaggtaccatagagtctctacacaggastaartcagcctggtgtgcaggggaggcagacacacaaacasaaaattggactacagtgctaagatgctgtaagaagaggttaactaaaggacaggaagatggggccaagagatggtgctactgtctactttagggatcgtctttcaaggcgaggggcctcctatctcaagctgtgatacagggtaggtcatgagcgcagtcttctgtaaaatgagggatctggacggaatagttactctctaggcttcctttcagtatgatgtcccgtatcagatattcctaatgtctgtagttctcccacaccccaccgtttattggctagtcaaaatattctttgcattgtaaagtgtagcataacattacaagaatggattaatgggttgggaatkctgggttttggccttcattctggtgctgtggtcctgtttcctcatttgtaaaatgaagggggttgtaaagatatattctctaaaacccctaatgctatggctgtggcattaagtcaaactattatttcttactgctttgtaccggacatcactttcacattagtaaaacttttcatcagtgtagtttctcccaagcttgattattgagaaagatagtgccttgtttttaacatcctgtatcctagttccaccgcagtgtttggtacacagtagatgtttaaaagaagcttattaaatcaaatggtggccaggctcatggggctcacgcctttaatcccagcactttgggaggctgaggtgggcagattacttgaggtcaggagttggagaccagcctggccaacatggtgaaaccccatctctagtaaaaaaamatacagaaattagctgggtgtggtggcacgcacctgtagtcccagctatttaggaggttgaggtaggagaattgcttgcctgggaagtggaggttgcagtgagccaaggtcgcaccactgcactccatcctgggcgaaagagcaagactccataccaaaaaaaaaaaaaaaatcaaatggggctgggtgtggtggctcatggccataatcccagcactttggtaggctgaggtgggcagatcacttgaggacaagagttcgagaccagcgtgggcaacatagcgaaaccccatctctaaaaaaacsccacaaaaaccaaaacaaatgaaaataaaataaatcaaatgggatagaaattatagtccttgcttttggatcctttcccacattgacatattagttcatagatcaggggactggggaggaattgggtttttaccagagggagacctggagctgacctgacagatttaaaccagctttatgggataatccgcttgagacggatgacgctgtaggcaagtgattcactgctgtttcattcctctacctgcctatccccagaaccatggccaactgtgagcgtaccttcattgcgatcaaaccagatggggtccagcggggtcttgtgggagagattatcaagcgttttgagcagaaaggattccgccttgttggtctgaaattcatgcaagtaagtggacttcattgttcccattttgattccttcatagtataggagaacactgtgattaacctgtttctcccygtctttcytatttaaagttctccacggtagagtgaacacaagtgtcttgagacctggaaactcctcagtgccctagcgtttggctacatcttggaacaaaccaagttatttaggattttccaaaatagtctctgtaataggaggtgcattgctacgggaaaagcagtgcagagttccacatatgactgcatctctgtaatttctgactgagagctgagcatgtttgagttsttggtcttgagcttcctgagcagataattttagagagatttttttccccctttgagacaggttgttttttagcaagaaagtctttccatcatcaattactagayactaataaatgcttattgtttagcatatattaggtatcataggagctggtggaggaaaactatggttttggttttggggaggttcttcagaaacagcagagagcagatgtacctgcaagctacttacaaagcaatcttttgataaatgcaaaggattgattgaccaataacccttcttcaaacaaattctagagataatccaaattctcggctgggtgaggcatagtggctcatacctrtaatcccagcactttgggaagccaaggcaggctggtcacttgaggtcaggagttcaagaccagcctggccaacattgtgaaaccccgtctctactaaaaatacaaaaattagctgggcatcagggtgggtgcctgtaatcccagctattcggcaggctgagacataagaattgcttgaaccagccaggtgcggtggctcatacctgtaatcctagcattttgggaggctgaggcgggcggatcacctgaggtcaggagttcgagacagcctgaccaatatgatgaaaccccgtctctactaaaaatacaaaaattagccaggcgtggtggcatgcgcctgtaatcccagctactcgggaggctgagacaggagaatcgcttgaactggggaggtggaggttgcagtgaccgagatcgcatcattgcactccagcctgtgcaacaagagcaaaactccatctccaaaaaaaaaaaaaaaaaagaattgcttttgaacccaggaggcggaggtttcagtgagccgatattgcaccacactgcagcctgggcaacagagggagggagactctgtctcaaaaaaaaaaaaagaattccaattctcaaatcaaataggggatagtatgttttctaaaagggaatcaattttggacccttctagtgcattttaaaatttagtttgacttgcaatttacttcctatgtgatattttagaaaaactgctttagggctggcacagtgactcgcctgtcatcccagcactttgggaggctccgtctccaaaaaaaaagaaaaaaaagaaaagaaaaactgctttaatgtaaaagagggtagactgatgttcatgctgagaggagaatatggtgtccaaggtcaaggagctggcatctaatgaaggttttcttgctgtatcatcccatgacagaatggaatagcaagagagtgcaagagtgagagagagcaagagggggctgatgttgattttataacaaacccactcctgagataagacattaatctgttcatgagggtgaagccctcatgayctaaacacctcccattaggcctcacctcccaacattgttgcatcraggattaaatttccaacatacgaactttgggggacacattcagatcacagcagaaggtaacatgagatggatgtgttgttgatcaggcatttaccatatgctgggcacatatgttttctgatttagtcttcatgccagccttgagaagtacttactcctgttctcgtggttgttagtgatgagcaacctaaggcttggagaggttcagtgatgtgcctgatagcatacagtgatgccactggaattttaacttgagtctctctgacccctgagtgcagatactttctcctttacattgaatttcctattaaggatatatgggtttggtgaagaatggacggaaggatagctgccatgactctaaaggggcatttaaatctggtgtggaggcaggaagcaagggagaacttgaggttcccaacccccaagcccttaaaaaaagcccgtgatctgttttgcagactaaagataatcagttagggcctggcgtggtggctcacacctgtaatcccagcattttgggaggtcaaggtgggtggatcatctgaggtcaggagatggagaccagcctggccaacgtggtgaaaccccgtctctactaaaaatacaaaatttagctgggtgtgatggcgcatgcctgtagtcccagctaccagggaggctgaggcgagaggatggcttgaactcgggaggtggaggttgcagtgagcggagatcgagccactgcactccagcctgggtaacagagcaagaccctgtctcaaaaaaagataattagccgggtgtagtggtgcacacctgtagtcctagctactgagaatctgaggcaagaggattgcttgagcctgggagtttgaggccgcagtgagctatgatcatgccattgcactccagcctgggtgacagaaagaccctgtctcaaaacaaacaacaaaaccaacaaaaagataattggaaccaattaatagaattaaaaaagtattctgataagggaaggtcacctcagggtctgttagacttccacaacaaaagtcttccatttggataggaaaggacagggcgagggttggatccctaccacggagtgattatatggccatgtaattttactttggcaagtgatgataactggtggctgaatgatggggcttctgggcagccagtctccacatctgtgtgtgtctctgatgtgtgtgatatgcgtcatacagtgcagtaccacagagctggaaaaaccatgggaccctgttagattttaacaagcgtatatgcagtacaagagagaacacagccaaactgagttgaaactgctaagcagatggtttgttctctagctaacttgattcgttcccacatattagccttgcagtatgagaggttctaattcatttttcagcaaaattatttattactagatgtcatgcacttttgggtgatttgcagatacctttggtaatcacatggtcatcactgctgggcttttatcctctgaataaacgtgaagcatccctgggtaatggcctggtttagtttgctgctcattaaatgccaagacttgcttcctggtgtccttctaacattttatttggggtttgctctgggaatggaaatttattgtattgttgattttcctgtctaaaatgagatagttgagggccaggcatggtgggtcacgcctgtaagcccagcactttgggaggcggaggctggaggatcacttgagtccaggagtttgagaccagcctgggcaacatagtgagaccctatctctacaaataattttttaaaattagccaggtatggctgggcgcggtggcttacgcccgtagtcccggccctttgggaggccaaggcaggcagatcacctgcggtcacctgagaccagcctggccaacatggcgaaaccctgtttctactaaaaatacaaaaattggccaggcatgatggcsgccacctgtaatcccagctacttgggaggctgaggcaggagaatcacttgaacccaggaggtggaggttgcagtaagtcaggatcacgccactgcactccagcctgggtgacagagggagactctgtctcaaaataaataaataaataaataaaattagccaagtctggtagtgtgtgtctacagtcctacctactcgggagtctgaggcaggaggatcacttgagcccaggagtttgattttttttttaaatgagatagctggatttaattttaatgttctgtggttttattatcagtcagtgccaatagggagacaactgatataaaattggagaagtacatttagtcctgtcactgctcccttccagtgtggagaatgaattgggttataacagaatcagtgagcccaaccgctcatgttttacatagcagggtggatgaggggaaattaaatggattatatgtccttagatggtttgggggttattctcattctctgtcctgttgaataggcttccgaagatcttctcaaggaacactacgttgacctgaaggaccgtccattctttgccggcctggtgaaatacatgcactcagggccggtagttgccatggtgagtgtgcctgtgtgggatactccaagtatgcattgcttgtcatctgtgctaggctctcttctagacactggggatacagccatgaatgagaccaaatagatacctgttttcatataycagctaatggttagtgataggcttcagaaatgaaatatgcccagaaatgaataggagtagcaaatgatcactttagattgggtgatcaaagaacgcaatttttaagctgtgatctgaatgacaagaagcagcgatctgaatgacaagaagcagccagccatgtacagaatcacagtgaaaaacatttccagccaagcaaacagcatgtgcaaaggtcccagggtgggaatgagcttggctttttgaagtacgggaggagagttgaaatgcccgaagcctgatgggtgggagggaagttgggaggtgaagagttcagaggcatgggcaggggccttctctcttaggggtgtgttgaccatatacttcctgagtgctgggaagctatgggacacttcacacttggcatttctttttttttttttttttgagacggagtcttgctctgttgcccaggctggagtgcagtggtgccatctcgtctcaccgcaagctccacctcccgggttcacgccattctcctgccttagcctcctgagtagctgggactacaggcgcycgccaccacgcccagctaatcttttcgtatttttagtagagacagggtttcaccatgttagccaggatggtctcgatctcctgacctcgtgatccactcccctcagcctcccaaagggctgggattacaggcgtgagccactgcgccctgcccacacttggcattttaaggaggctgctctggttgctgtatggagaatacattgtagaaaggcaagcatgagggcagggagatcaggatcctcagtgctggaataagtggatatactctataaacatttgttcagtgaatgaatataatcttaaggggcctttttatttttccttttttgaattaatagttgccagattttctgctgtgattggttttcttctttgaccatatcttcttctgtccttggaggtctgggaggggctgaatgtggtgaagacgggccgagtcatgctcggggagaccaaccctgcagactccaagcctgggaccatccgtggagacttctgcatacaagttggcaggtgagattttggtatttttcccccttttccaaaatctgatttagttgccacaaggatttgggtttccgaggctggaggtagacatgataccatatgcaggttgattttatcggagtttattgttttcctccctcttaagttggcgtttggctttggttgttaacatcacttagtcgtacctctgttacacgaagtgtagaacctggtacaacacactttgctggccagtctttcctgaaggctctcactgtttgcaccagcgtggccgggagggctggatgtggggagggcatttttcagccttaagtgaatggccattgtaggctttttcttttaacatggtctaatgtccatggagcttsagcttttatgctgctgtggctgtagatttctggcaatgggmgcattttaatccttctggtcttggtcatgtgactatctctttctccacccaggaacattatacatggcrgtgattctgtggagagtgcagagaaggagatcggcttgtggtttcaccctgaggaactggtagattacacgagctgtgctcagaactggatctatgaatgacaggagggcagaccacattgcttttcacatccatttcccctccttcccatgggcagaggaccaggctgtaggaaatctagttatttacaggaacttcatcataatttggagggaagctcttggagctgtgagttctccctgtacagtgttaccatccccgaccatctgattaaaatgcttcctcccagcataggattcattgagttggttacttcatattgttgyattgcttttttttccttcttttcatgtacactgaataacctgacctaatagagagtgtaaatactataaaaatgatttattttgagrtctcacatacacacaggcattctttgcctgcccttcttaacccccgcatcccttccactcttggcactgagctattcaacaggcatctatggagcatgtgctacgtggccaagactggactaggtgcagaggattcatcagaaatgaaagaaaacatgagggctgggtgtgctggcttgtgcttgtgataccagctacttgggaggctgagatgggagaccagcctgggtarcatagcragaccctgtctcactaaaaaaaaaaaaagaaaaattaggctgggtacgatggctcatgcctttaatcccagctattcaggaggctgaggaggagaatcgctagaggccagaagttcaagtccagggtgggcaacatagcaagacgctgtctttacaaaaaaaaaaaaaaaaaattagctctggtgctgtgcacctctagtcctagctattgggaaggcataggcaggaggattgtgcccaggagtccaaggctgcagtgaaccatgatcatgctactgtmcttcagcctgggtgacagagtgagacatctcttaaataaaaacatatccatcctgttcttgagaagctcttggggattcagtgaatgggggagygtgggaagttgtaattcctccaaaaatcagaaaagctaggtagatagtaagcctgagtccctgggatggcctcaaatgaagcaggaggtcttgtaagtagctttgatttgttaggtattgatttggttgctttaatggagacaagatagaaatgtacttctctttcatttgaaagttcaagtgtggtcagttgcagtggctcatgcctataatcccagcactttgggaggccaaggcaagaggattgcttgagcccaggagtttgagaccagcctggggaacagagtgagacctcatctctgccaaacattaaaaattagtcgggtgtggtggcacattcctgtagtcctagctactcaggaggctgaggtaggaggattgcttgagccccggaggttggagcagtgagctgtgatcccgcctctgcacttcagcccgggtgacagagtgagacctgtcttcaaaaaagaaaaagccctagctgctcagtaggggtggtgatagtggtaaggctctgatctttaaggtggtctacacacacctggttccttctaatcagtcctacttggattaccaccccatgtcccttcctgcaagttgggaaggaaagtggaagaagtaacccttttaaagacacaactctgaattacaaccttcacttcctctcacatcccactggctagaacttagtcatatggctgcatctagctgaaagagaaattagaatttttttttttgcttttgagatagggtcttgctctgtcgcctaggatggagtgcagtggtgtgatgacagcagctcactgcagcctcgacctctctgggcccaagtgatctcctatcttagcctcctgagtaactggggctacaggcacrtgccaccacgcccaactaatttttgtattttctgtagagatggggtttcatcatgtttcccaggctggtctccaactgctgggctcaagcgatctgcctgcctgggcctcccaaagtgctgagattataggcgtgagccactgcgcccaccctgagggtttttcttttttctttttccttttttttttgagacaaagtctcgctcttgtcgcccaggctggagtataatggtgcgatctcggctaactgcaacctccgcctcccgggttcaagcgattctcctgtctcagcctcctgagtagctgggattacaggtgtgtgccaccactcccggctattttttgtatttttagtagagacaggttttcaccatgttggccaggctggtctcgaacttctcacctcagatgatccacctgcctcaggctcccaaagtgctgggattacaggtgtgagccactgcgactggccacctgagggtttttcttatctttccttttcatctggcttcggtagaggcaatagaggggaagagacttctcaggatgggggagaagagggtagttggggtgggctgcctttacagacagatgatggcgagatgaatttttttttttaatttagttttttttttttttttttttgagacagagtcttgctctgtcacccaggcgggaatgcagtggtgcaatctcggctcactgcaagctctgcctcccgggttcacgccattctcctgcctcagcctcctgagtagctgggactacaggtgcccgccaccatgcccagctaatttttttgtatttttagtagacattgggtttcactgtgttagccaggatggtctcgatctcctgacctcgtgatctgcctgccttggcctcccaaagtgctgggattacaggtgtgagccaccgcacctggccccctttttttttttttttaatttttgagatggaatctcaatctgttgcccaggctggagtgcagtggcacgatctcagctcactgcaacctctgcttcccgggttcaagcgattctcctgcctcagcctcctgagtagctgggattacaggcatgcgccactacgcccggctaatttttgtatttttcttggggacggggtttcaccacgttggtcaggcttgtctcgaactcctgacctcgtgatccacccgcctcggcctctcaaagtgctgggattacaggcgtgagctaccgcatccagcctgaatttctattaatacttttacacaaagcgtggcctgtttgttttggggcgtgagatgagcataccaggacttgggggaatgaacatgtgtgtagtgaagctggagggttacagcctccccagttaaggacagtcttcccaggaaggaaagaagaggtgaaagcagaggggtggtcctgactgtaccctgagtagccatcagtgacctgaccaaggggagcagatagctctcccctggacagagaaaagtccgtgcaatttcgagacctgttttcacagttgacatttggtaatccaaatgagagtgtgtttcagatcgaagccaaaaaataacagtgcccccagatgagggcacatgacagtcattgtcaatgtgtggtgggctaatgctctgtaactagaagtttggaaagccgataaggtataacagaggccagattgtcatccatctggccagtgacaggtgatcagcgcagtgctaggggcactcgggtgatggcatgattgctgtggtcagctcagagtcctgaggggaagcaagcgggctctcaccatctcagggcagtaccactgctgtgcggctgtcagtcagtgctgcaggcgccgagaggaggggcttgtgaccgccccagggaagctgggcatcaccaaagggagcttgtttgccagggacactgcaagtaggaagtgtctacaggtcgatgacaggcctaatctctatgacagggtctagactttcctcagggtccaggggcgcacctcagggtgaactggaaaactcgaccgcactttagtgccaggtgggcagggatccccatgtcagggtgggagtggggcggctgattggggctggaaatgtaggtggggaggcggcagccagggagcagggcatcctgcgagaagagcatcccgctaaggagtctgaacgccatcctgtaggcgggggagtcatcaaggcagggcagaggcaggaccagatggccgtttgaggtgctgagcaaagctcccggtttgcgcggagaggtgagatcgaggccccttgggaggccgaggcttaaccagggctcaagcagaggggagggaaggctggatttcagaggtagggaggataaggaccgtgggtgcacgacggggagggagagccaagtcaaggttaatgccggtgctcgggcggatggtgaaagcagcagatggccttgaccggggtagagaactcgagcacaggagcaggttctgtgtgtgtgtgtgtgtgtgtgtgtgtgtaggagcttttggggtcacgggaagtactgagaggtgaggagtgggatttgggacgtgcgtagttgaactcataggacgtccaggtggagaaggaatcacttcctgtctctggatccgtctcgatctctgcctggcgagggcgcgccccggctgggcgtggacactgttctccggccgcgtcgggccgggcgggtggggcgttcctgcgggttgggcggctgggccctccggggtgtggccaccccgcgctccgccctgcgcccctcctccgccgccggctcccgggtgtggtggtcgcwccagctctctgctctcccagcgcagcgccgccgcccggcccctccagcttcccggtaaggcggtgggggcgcatcccctggcgactcctcccgttccctcttccgcttgcgctgccgcaggtgggcccggtctgtgggcgccccccgatttcccgcaggtcccgcgcggcgtcggagcgggagattcccttgcagcttgcgccccgcgggccttcgggctccgcagagggacgccggccctgcgcggggcggaagcggccgggaagccacgtgtccccgcggccgcgcgtggtgggggaggagggaccggcggcgcccacgtggcctccgcgggccccgccagagcctgcgcccgggccctgaccgcacctctcgccccgcaggaccatggccaacctggagcgcaccttcatcgccatcaagccggacggcgtgcagcgcggcctggtgggcgagatcatcaagcgcttcgagcagaagggattccgcctcgtggccatgaagttcctccgggtaactcgcccccgtctccccttccccgctgcagccggctcgcgggtgtttttccctcccggcggcggtttgtccgcgtctgctttccgagttcatttcgctgccgcgaaatccctttgccctctgcccccgcccacggcggcttgggcccgccgaccctttcccggggtggtggggacagacgcccttgggaaggtgaagcgctggtagcgtgactcgccctccgggtttgggttccttcccgcgggccgctacctgcccacccgccgcaggggggcagcagggagcggaaaaaccccgggccccagaccccctgcgcctgcccactcgggtccacctaggcacagaatggaggcttggaatctcctttgctttagtctgaaactccgagttccagtgcggtgctcctcctttagcatagggtagtgastgtattttccacattaaatttggggcacagatctgaatccctacacttacgggtaagaatctaagtactgaaattcaaccaggctcatcggtgaagagaatgttctcagttattatctgaaatatttaaaagggcattgtgagtagcccaggggagtttaacatgacctctgccaggcagatgacctgacatatgtacttcagttgcagccaaaatttaattccctaaatctagatcctcaaaccacctactttttaggcttacaaaacccctaatgtcattgacggtatgagggtgtctttacgattagaacagtcttggccaggcgcggggctcacgcctataatcccagcaatttgggaggccgaggtgggtggagcccaggagttggagatcagcctgagccacatagcaagcccctgtctctacaaataaataaataaataaataaaaattaattgggcatggttgagtgcatctgtagttccagctacttgggaggctgaggtaggaaaatcacttgagccctggaagttgaggctgcagtgagccatcattgtgccactgcattccagcctgggtgatgatagtgagaccctgtctcctaaaacaaaccaaaacaacacaccaaaaaaagaacagtctttctgttaaaatggcattagtttcatggtttggatgggatttaaaaaatatttatgtgtgtgtatatgtgtgtatatatatatatatttccacacaccacttaggaacgtgggctagaatataaaaccggacttgctaatgggaggttcagaggatgggttggagtctttccagcttagctcctaactggtgcctcctctccaatgccaggcctctgaagaacacctgaagcagcactacattgacctgaaagaccgaccattcttccctgggctggtgaagtacatgaactcagggccggttgtggccatggtgagtgctcgtggggaatgagagaaaatgaggaaaargtgctcagtgttctttgttagacatctccctcagctaatctaaattttattttatgaatggaacctgctgaagttacttaactgagcaactaggagcttgggaggagaaagcaaatcagaccttagaaatgggaaggatgttagctgggtgtggtggtrcacggctgtaatctcagctacttgggaggctgaggtaggagaattgcttgaacctgggaggcggaggttgcagtgagccgagatcgtgccactgcactccagcctgggcaacagagcgagactctgtctcgacaaagaaaaaagatatgggaaggactttttcaggtacatgtctctatggttaaatagaatctcactgcctgcaagagtggtaaattttcgggccaggcttggtggctcatgcctgtaatcccagcgctttggaaggctgaggcgggtggatcacctgaggccaggagttaatcccagttactcagggggctgaagcacgagaatcgcttgaacttgggaggcggaggttgcagtgagccgagatcatgccactgcactccagcctgggcgacagcaagactccatctcaaaaaaaaataatactcaatttcttctgtttgacaagtgttttagaccttaatgtttcctagattaaaaaactttatcctattttctcatgaaaaattcaaaggtaaggatgtaagaagttctcaatcctatactagaagcagtttcttctggatggtgctaatgtccatttgggagtggagagaatatgaggagagagtggctgggcgaggtggctcacacctgtaatcccagcactttgggaggccgaggtgggtgcattacaaggtcaggagttcaagaccagcctggccaacatggtgaaaccccatctctactaaaaaaatacaaaaattagctgggcatggtggcgtgtgcctgtaatcccagctactcgggacgctgaggtgggagaattgcttgaamctgggaggaggaggaggttgcagtgagctgagccactgcactccagcctgggcaacagaacaagactctgtctcaaaaaaaaaaaaaaaaaaaattggagagagtaaaatagggaggcagtgaaattgttgagaaagtagatctatttcctgttcacctttttcttccttctgctgttccctggaatccttaccctagcatgttagtctttcttttccctcttctagcagtcttctgggatgcccttcccactgatcctattccasactggccactttctcctttcttcaccagttcttctgtgttgatggctgcataaggattctgcaacattgtttatctctgtctcagctaaactgggaagtccccaagttggacagacttttctttgaatcctagcaatacrtttggaatgcagtttttatataggcccctactctctgctggggttagctgataatcatgtcactgatcggtctcattgatgtgtcgtgtcaggtaggagtaaatgttagaccctacctgtcctgagtggcaggtctgattataaatccattttcacactttcgaggtctgggaggggctgaacgtggtgaagacaggccgagtgatgcttggggagaccaatccagcagaytcaaagccaggcaccattcgtggggacttctgcattcaggttggcaggtaagtccggggacaggagggtggatgacttttatgcaacaccatttaaagcagacgtcatggcgtatcctactttcagaagaatctgtgcccttttttttttttttttttcttgagacggagtctccttctgcctagctggagtgcagtggtgccatctctgctcactgtaaccttcacctcccgggttcaagcgatcctcctgccgcagcctcccaaatagctgggattacaggtgcacactgccacgcccggctaatttttgtatttttagtagagatggtttcaccacgttggccaggctagtttcaaactcctgacctcaggtgatccgcctgcctcggccccccaaggtgctgggattacagacatgagccaccgcacttggcctgaacttttagttggtgattatcattgtataaaaactttcaggctgggtatatcattgtataaaagctttcaggccaggggtttacgcctgtaatcccagcactttgggaggccgagatgggtggatcacctgaagtcaggagtttgagaccagcctggagcctggccaacatgaaccccgtctctactaaaagtaaaaaattagggcatggtggtgcatgcctgtaatcctagctactcaggaggctgagacagaagaatcgcttgaacctgggaggtggaggctgcattgagctaagatcacgccactgcactccagcctgggcaacaagaacaaaactccgtctcaaaaaaaaaaaaaaaaaagctttcacacatagcttcttccctaggttacttaattttaagcaagacaacaagggagccataagtggtaattcctgtgtagtacagcaaaaaatgctaggtgtggagaagggaagcattctagccacatccatgagtactttgtccatgggtgtgtcacttaaccttttgattccctcacctgtacacagtctgttcaaaacctttacaaagttgtgaggttgaagtgggataaagggatttttattaataagcagtgttatgtcatggttgggctttgcaaatcagtgttataagaaaatgcagcagagctggcctatgataatgaacacatcatatctagttgggatgttgatctgcagtgggtttgagtatcactgtattttccaaaatttgcggaggagtgttttatgtcttcggcaatcttggggtacaagcactcttttgatggggaggccagacttggaagcataatacagttgaaacaaggaatgttttaaatcaagcacttttacagttgtatagctgcttttaaaaggaaatgctttgggggtataaattggtctgttgcttcaagtggcaatttggctgaaagagtctggagtgctgtccattgcggtacccattaaacagacttttgcactttaaaacatggcaacttgtaattgttttctttcttaggaacatcattcatggcagtgattcagtaaaaagtgctgaaaaagaaatcagcctatggtttaagcctgaagaactggttgactacaagtcttgtgctcatgactgggtctatgaataaraggtggacacaacagcagtctccttyagcayggcgtggtgtgtccctggacacagctcttcattccattgacttagaggcaacaggattgatcattcttttrtagagcatatttgccaataaagcttttggaagccggacactgtctccttgtgcttatttgatactgagctgaaagaagtgacttggttctctggctatagtagcattatgtacatctaaatcctgcttgtcaaagaatgatctgatcctgacggagtttcgctcttgttgcccaggctggagtgcaatggcgcgatctcagctcaccacaacctctgcctcccgggttcaagcgattctcctgtctcagcctcctgagtagctgggattacaggcatgtgccaccacgccctgctaattttgtatttttaatagagacggggtttctccatgttggtcaggctggtcttgtactcccaatctcaggtgatctgcccgtcttggcctcccaaagtgctgggattacaggtgtgaaccaccgcgcccggcctatttatttatttatttgagacagagtctcgctttgtcgcccaggctggagtgcagtggcgtgatctcagctcactgaaacctccaccttctgggctcaagcctagttggtcaagtggttcttgtgcctcagcctcccgagtagttgggattacaggtgtttgagccgctgcacctggccacttgtaagaaagatttgttgaaacttggagtgaaacatacagactagggaaatactctagatttatgtatctgctgattacaaattgggcaagttacttattaggaaatggaagcctaaagacatctgtgaaatggacatatctaccactgtaattcaaggttaatgaaattatgtatatgcagctaacctagtgcttggcctatagttggtacatatttctgcaaccctaccccttaatttttttccctggggtgagatacttattcatgctggtttcctgggctagatgcagtgagtggttgctagaggcatatttcctgcttttgaggttaattttgctggattggaacagttgtaaaatgttaatagcacctgtcaatacaaatcatttgtagcactatcacctgcaatcaattataaatttatatttcctataaaaaactggtaaaagctaaatgtcactcctatatataacaatcctatgctttttttttttttttagacggagtcttgctctgtcgcccaggctggagtgcagtggcctgatcttggctcgctgcaatctctgcctcccgggttcaagcaattctctgcctcagcatcccgagtagctgggtttacaggcgcctgccaccacacccagctaatttttgtatttttagtagaggtggggtttcactatcttggccaggctggtcttcaactcctgaccttgtgatccacctgcctcggcttcccaaagtgctgggattataggcgtgagccactgcgcctggccaattctatgctttttatgtatactgctatggtaaatattagacaatgacattgtgacataagtacgtatttggtctctgccattggttcctggcacacagctcctaaaatccttgtaatctcaaatgttaggtttcttatatgctaatgatatgactggtggctgtgggggctcctggatagcctccctacaacctccaagaagaggagaggggctaaggttgaattgctcaccaatggccaattatgccatcaatcatgcctatgtaatgaagcctccataaaaccccagaatagggtttggggagcttccagattgctgaggtgcttggagggtggtacactctgagagggtagctccatgccattttccacataccctgccccatgcatctggtccatctatatactttatttttttagagatgggggtttcgctatgttgttcaggccaagctttgaactggctcaagcagtcctccccactcagcctcttgagttgctgggatcacagatgcgcaccactgtgcccagccacatcctttattaaaccaatacatgtaagtagtagttctctgagttctatgatactctctagcaacttaactgaatctaagaagggggtcatgggaacccttaatttatggccaattggtcagaagaacaaagacataacctggggcttgcagttggcatttgaaatgcgggcagtcttgggggccggagtccttaacccatgggatctgactccaggtagacagtatcagaattgaagacacccagctggtgtctgctggacactatgtctagtgtcagaagtgttgaggtcagtgacagagtagagagaaaacagctcaattttcctttggaatgaagcaagaaatacttttaatgttttagtacaaaaaaaatgtgtaaagattctagttactagtcaacaattgataagtttattttaaaaatcattcctcaatttcaaatgtaattcatatatgtttatatatgctacattctcatcacagttaagcagagtttaatactaacatcttaagagtctggggcagggcctgagcacctgcatttcactgtgctaccagtgacacttatgcatgctggtggaggtacctcggttaggagcagcagcagagcatgggcttactctgccagggctgttcaaagaactttatatacatgcattcattgcatcttcatgactcttgggtggctggcaccagtatccccattttacaacggaggaaactgagccaagttacataactagccgtggaggaggagccagtttccaacccgatagctgtcttcagactccatgcccacggccactatgctttaccttttttttttctttttgagatggagtctcgcactgtcgcccgggctggagtgcagtggtgcgatctcggcttactgcaacctctgcctctcaggttcaagtgattctcctgcctcgcctcctgagtagctgggattacaggtgcccgctaccacacccggctaatttttttgcatttttagtagagacggggtttcactatgttggccaggctggtcttgaactcctgactttgtgatccacccgacttggcctcccaaagtgcttgggattacaggtgtaagccaccttgcccggcctttttttttttttttttttaaactgtctttactttcccaagtgatgtgaggaagtgagtttggagggtaagtgacgtcaacctgtagtggtgaaagctgagtaaggctttggatgttaggactcaatttgttagaactgaatgagaaatacagagtagactatggtgagatttaaagtactgcctctgggccggcgctgtggctcacaactgtaatcccagcactttgggaggccgagccaggcagatcacctgaagtcaggcgttgagaccagcctgaccaatatggtgaaaccctgtctccactaaaaatacaaaattagcagggcatgatggtgcatgcctgtaatcccagctacttgggaggctgaggcaggggaatcacttgaacccaggaggtgtacattgcagtgagccgagattgcgccattgcactccagcctgggcaacaagagcaaaactccgtctcaaaaaaaaaaaaaagtactgcctctggagagtttaggtcctaatcctgcaccagctaggtgtgtgaaagtaacaactcatttatttatttgagagacagtctcggctctgtcgcccaggctggagagcagtggttcactcagtttactgcagcctctgcctcctgggttcaagtgattctcgtgcttcagccacccaagaagctgggactacaggtgtgtgcaaatacgcccaggtgatttttgtagttttcgtagagatggtgtttcaccatgttggccaggctggtctcaagcaatctgcccaccttggccctccaaagtgttaggattacaggcatgagtcactgcgcctggctgaaaatgacatatcattcagaacatctcatgctttcaataaacctttttttttttaaaaaaaatagtaaaagtgcattattatttaaaatgcattaccttagctggatgcaatggctcatgcctgtaatcccagcactttgggaggacaaggcaggagcatcccttgagcttgagacacttgtttctgggcataactagtttcgcaagaagcatgtaatggttcaaagaaatacatgtggctgggcgcggtggctcatgcctgtaatcccagcactttgggaggctgaggcggacagatcacgaggtcaggagttcaagaccagcctggcccatatggtgaaacccccatctctactgaaaaatacaaaaattagccgggcgtggtggcgtgtgcctgtagtcccagctacttgggaggatggggcaggagaattgctagaacccagaagatggaggttgcagtcagctgagatcacgccactgtactccagcctaggtgacaaagtgagactccatttcaaaaaaaaaaaaaaaaaaaaatgctgggtgcagtggctcatgcctgtaatcccagcactttgggaggccgccgaggcaggcagatcacgaggtgaagagatcaagaccatcctggccaacatggtgaaaccccgtctctactaaaaatacaaaaattagctgggtgtggtggtgtgcacctgtactcccagctacttgggaggctgaggcaggagaatcacttgaacccaggaggcagaagctgcagtgagccaagatcatgccactgctctccagcctggtgacagggtgagactccatctcaaaaaaaaaaaaaaaaaaaaaaaaaatatatatatatatatatatatcaccatgatagtaaatgagcacccacctaggaattccagcttactacagcagctgttcaaaccacttacggtagaaagcagggcagaaatcaggctcttttcttggaatgcgttatgtgaaattaatccctgaagaggcccagtccatctcattactgtcttacatattgtttcccaattcataaaaatctctaccaactgcatctgcagtaaaagttgaataattttccaaagagccagctgttggtaaaggagggcttctttgcattcccttttaatgttaagggcaagagctagctgggatactttatttacatccaattaactttgctgctgaggttaatggagttaaaaaaaagtctcctactagccaggcatggtggctcacgcggtcaggagatcaagaccatcctggctaacacggtgaaaccccgtctcgactaaaaatacaaaaaattagccggtcgtggtggcaggcgcctgtagtcccagctactcaggaggctgaggcaggagaatggtgtgaacatgggaggtggaggttgcagtgagccgatatagcgccactgcactccagcctgggtgacagagcaaaaaaaaaaaaaaaaaaaaaaaaaagtctcctactaagcatgccaaccccaaaacacgatgttctagctaagatgatttaatttccccataaaggtccctattcaccttggctcctgctgtggtttttgccctttccctccctgcccatgaaatcccacctccaatgcaacctcatccatatgtctaaccatactactcttggctcccttggcagctagtggaaaattcttccttacagcactcatgtgcctgctaccccttgtaagaggaaggggctgatccaactttcataggggtctctgactgcttatagagggcacgcaatagaaaagcaaccccccaaaccaaagcatattaaagaactgctcaaatccagcttaactttaacattttattttgtgtaaaaaagggcaaatttagtgaattattttcatcttgtacacaaagttataattttaatgcttttcacatccatgctgaaaatttgcaatttggtaaaaatgaaaggaacataaatttttccaaaggaatttttcacgccattatatatacacttcatgagaaagtttcaaacactttctcaatgatcacgagttaccaagaaaataaaagattaaatttgtacagatattgatctatatatcaaatacatacagaaatgatgtaaaaaccttatgcagtttactttgacctctgtcctcaaaagatt

SEQ ID NO: 94491 - DNA, 52429 bp, Homo sapiens
tagactttgtctcaaaaaaaaaaaaaaaaaaaaaaccctttgtggcggcaatgagattaaggatgtcttttattttcctcaaattttcatttagtgttattacactgtgttaatcattttgaaatggtggaagggggttgagggcaggtgaaagtgctcctctagccccttcctgtacatacttgtcctaaattgacagagaggaaagaccatgtctgcttattcagcttctggccaatgcctagcacctatcaggtgttaaataaacatttgttgaatgtataaatgaaaatgcctgcagtctaaatgtctcagcccatggtgaccgggtactttccaccccggcaaatagagcaatttggttttgctggaataaaaaaatgaaggtttatccataatggcaattccctggtcttcttggtaagtgaatgtgggcatggagaacccaggagagacagtctgttaaagaaaacccaattaccattgtggaacatatgttgccctgaggcctctgctgccataacaacatcttgtaactataactacagccctggagggctttggccccatagaatatggaaaaggatgtcttcatcataagacagctttgtgctcagattgacttccctagggagcttggatcagggaagggaggtagataagtggaggaagggggggagatgaagggcagaggtgggagaagaactgctattgaatcaagatcagagtgatttttttttttagcgattttcaaaatgtggttatttgactgtttagctttggtggttatttatatccccagctgcagaggcagggagctgtgcctgagcctgctgggatctgtccaataacttctcccagggtggggctgcgggtgggggctaagggtgctacaagatccaaattaggtggccagaatgtaagagaagctccaggccatctccagcaagagtaaagaagaagggcctattagtgactgtgctgaccatttttaaggcagctgcaaatgaaaatattttaataggaattacggtcacatcagcaacctctgagattctcccaaaaggatagagactaagccaatactttgcctcagaagttatgagattgacctggctacactagcattgtctttaaaaggccaaggcatgcttcccccaccttacaagactgcacacagaggaaatggctatccctaacccctactagccacctcactggtcagaaagaggcttagaggagagagcatggctggttctgtgcaagcctttcctagctgagtcaacaactggcagtggggtgagaaacattcaatttggtgccaccccaattactaagcccttttgggtgccagtcagcaagggagaagctggagatgctgtggccatccaggcaaggctcctaacctctggaagaagcaaacaatgaacaactacattttgtatttgaaatatggtacctataattttactgtcaaggaaacactttaaaggacatcaagggatcttttaggcagcttacaaaactgaggaggcaagagactgatacaagtaaggaaataacacaagcacatacacacaaaagattgcccccactcccagtgcctatttcagtctctccttgtctctggctaaggctatttcagcagccttctaactggtctcctgccttgggtctccctcctactctgatcagtgcccttcacagctgccagaaagagattgctaaaatgcatgtctgactggcggcctcctctgcttaaggactttcagaaattgcctaccacttccagttcagtctccacagaagggtgctgaacactctgcatgaactggttcccaaaaccatgcctcttatgtaccctccccggcacccatagataatgctcctccacacctctctactattgcacattctgttttctttgcatggaaaacccttatattgtccttgtttactggcaaacattcatcctgtgaaattccactcttgcttcacgtcttttatgaatcctttcctaaactttccagatgaaacactctacctcctcctctgtagcacttctgaaccttgcttatctccctattttcccatgtaatactctacagtgttttgtaagtgtgtgctcactggcttgtcttccctactggattctaagctcctttaggggaaagttggtgttttgtccatggggtataactcagtgcctggtacctgggtgattaatgcctgggtaatcactctgtatgtcttcagttaaagtggttgaacagaggttgaacagagttaaagaggttgaacagataaaagcaaacaatcactgagaccatgtaaatatatagtcactaacattagaatgttatagccatgattagagtgactggaaatataaataacaatagccatttattgagcaattactccatgtcaggaactgtgcaaagagctttacaacactcatcttctttattccttacaaccttgtgaggtggctattaatgtccccacatcacaggtgagaaaactgagacacaaacaaatttaaaacttgtccaaggccgggcatggctcatgcctgtaatcccagtgctttgggaggctcagatgggaggatggcttgaggccaggagttcgagactagtctgggcaatgtagcaagacctcatctctacaaataatttaaaaattagccaggcatggtggtgtgtacctgtagtcctagctactcgggaggctgacgtgggaggatcgcttggcccaggagatcaaggttgcagtgagctatgattgtgccactgcactccagactgggtgacaagagtgagacactgtctcttaaaaaacaaaaaacaaaaacaaaaacttgtccaagagtaatgcaggtaggaagcagcagagcggagattaaaattcagatctgacatcaaagccctgtactggacactagtacagctgatgatacaataaacatgatttatctatgtttctattatctgtttgggaagggaaatgaacagaattatctaccaaattgtacaaggaaaataacaaatccagcagttaagtgcaaaataacatatcattacgccctactaccttacaaagaatgaattggaaaagattttctgaaaaaataaaattttattgagggttaggagatgcatccaggcaggaagaaaagcctgagaaaatagaaaggcaaggagaactgtcgagagtgtcaacgtgaagtctggtgattgaggatagccagggggcaaccagtcagaggcattgaaatcaacatcagttcctgcttggaaagctaattgtgttgtgatgaacatgactctcaaagtaaatattatatttggttttttaaaaaaagaagaagaaataagcttttaagatcctccccttccccattctaaatatacctggctggtctactttcaagtactatacacatttttttccttatgatcatgtttctatcctactggtgttagttttttcatctttctgccagagtgtacactttccaaggacaagaaccatatctaaatgaaactgtaaactctttagtgtcagctgcagtcttagggaatctagcataagaaattaactaacgtcgaacatctgtaatgctggtatttgtgtgacggatgcaagtcaggataagatcttattctaaaacactaatttccagggaggataacttcaccatctctgagcgctatacattcagagactgtaaaacagtaatgatattcttactgagtagcaagcatttactgtgggaagaacgaggtttgagcaccattggaaaggatggtatgagccaggcgcagtggctcacacctgtaatcccagcactttgggaggctgaggcgggtggatcacctgaggtcaggagttcaagaccaacctgaccaacatggagaaacactgtctctactaaaaatacaaaaagtagccacatgtggtggcgggcgcctgtaatctcagctactcgggaggttgaggcaggagaatcgcctgaacccgggaggcggaggctgcggtgagccgagctcgtgccattgccctccagcctggcaacaagagcaaaaccctgtctcagaaaaaaaaaaaaaaaaagaaaggctggtatggctgggagtggtggctcacaccttaatcccagcactctggaaggccgagacagtagttcagctcagtaggtcgagaccagcctgggcagcatggtgaaactctgtctctacaaaaaatacaaaaattagccaggtgtggtggcacacgcctgcagtcccagctactcgggaggctgaggcaagagaatcccttgagcccacgaggtggagcttgcagtgaactgacatccagccattgcactccagcctgggcaacacagcaagactctgtcttgaaagaaaaaaaaagaagagagagaaaaaaagtaggatggtatgaaataactgagatatgctcttaatgtaagagatccttaccaccagttggggagccagaacattcaaatgtaacctcaggaacatatccgtgagtgcaaaataacagagtaatgtatgaaattaaatgcttaagtggtgaggggctacatgaaattaaatgcttaagtggtgagaagtaatgtgaaccattttcaaataagttcttacgtgcagttcaacctaagtaggttatcaaaggtatttatactaagcactaaaagctaagtattaaatactaaaagctgcctgtgtcaacactggcccaggacatccccaaggagagtgctggctaaaggtctggaactttaaatctttagagttctttacttagcacatcaatcagatatttaccttctgcttctttgttctttagccctgctcctgggggaaatctccatcttaacggggcctcagtttgaaattggggttcgggatcctaacttaatgactgagcgtgcctgggttccacccagtcgcaattggtcaagacttggtcctctcaaggcctttcctccggagaggttaaatcctcaacgcctgctctccactttccagccttttcttaaggctcttctttcagcctagtatctgtgaccaacttctccttcctaggccctctcattattatttaaatgtccattcttttgggggcttcaacttcactaaaaacattccttcctcttcctccgcctcgtaactctctgctcaagcatctggatgccagaggtcatttgagctaaatggggttcaaagcttttctgactctggtactgcattccccactttcaaatcacatttttcaccccagggcccccagtggtctcaaacccaaacacagtgcggttaggaagtgggcactcgccacagagctaaattgggaattatttgacctgcagcttctggagaatggttttgcctcctccccgcgacatcaactaactcacttgctgttagctaagggcaaggacaatgtctcctctaccagacaggaaacttgatggcggacgctatccgttagttcctttttcaattccccattcccaccccttcgagaccacgatgtttcttaaaatacaaagtttcttttacaaaacatccctccgcaactttgagtttatataataaacggaaacgtcctttaaacaatcaggctacgaaggggttaaatctaatctcagcaacctgatggattctggggggtttccttcctcgactctagaaattaaaacgaaattttgcccaaggtaaagatgagaaccgtttacatcaactgtcaggcttctgccccaaacaagaatggctacccacgcccacaaacagagccactcacgtaactaaaaatggttggctccgggttccaccactggagtcactttctgcccaacttcaaaatggcgcccactagcttcaccaaaaggatcgaacttcccagcaccctctctggcccgtaacgtcaggtgacgcgagacccagccggaagtgaaggaaaaagcgcttcagcccgcggcgcctgcgcagaacgctccagacgctgagaggcaggaggcactagggatcgtccgcaggattgggactgatacagaggccgccacggagcccgccggagccaccgttcctgctgctgccgccgctgcccgaatcggaaccgtcgggccgcagccgccggcaatgccgcgaaggaaggtgagaaacgggagaggagggatggcgggtttctaaggacagtcgattgagcaccgtgacgcagttggccacgcctcacagtgcttgggtcccaactttccgctcccccgaaccttgttcagctaccctctcttctgtccatacccaacagaaaaatgtgggcccgaccctggcctcggcctatgcttgcaactattcccgccctctgcttgcctggatcggaggcgttcttattaattggtcgctgaaacgtctggaagcatattgattggctggtgacgccgcctgtttgggctcaacggtcacctccccgcgtgcggrggcggtgtctggccccggccccagcgctctcccactggctggagagaacgatccctcctctcctgattggtcgaggttggcagtctgtcctgtgggggcgcggcttaggcggacctcgattgggtggcccgaatccccgcctttccgagcggggacgctgataggtgcagaggcggggttttggaggcctcgttaccttccaggtgaggggcacaacaaagcagaagactgggtggtgggaagccagcgcccactcgcaggggatccctctcaggccagttgcctccaagcagttgcctctttccttatttgctagttcgacagcgcctagaaaatgcagttggtaaaaactaaaaacttctagaattagaaggcacttagaagatcacccaggaatggccccgtcgtttcttcttacagctgaactaacggaggcccatggagtgccgcaagccactcaggcagtggcagatccagaatatagaacaaatctaactcaattcaacaaatgtctattgactactttctgcgcggtggttgctgtggattcagaaattaattagatgtgatccctggcttaagggtgtcacagcccgataggagaaaacagacatgaataatcttagaaggatctagtaagttctcagcttggaggtgtatacaaggtgttgctggaaggaagtgaaggagcagttaagtctgccctggagtacaatgggagatatattggtaaaagccacagagaagagctgagttccaggatcaagccaggaaggaataagtctcacgtcaaggctttaaatatctcggtaattagactataatggtgacttttaagattcccccttcatttcagccgttttctgtgattcttgctcatttcctggcaggttacccttaagatacttggaaaactgggtggtattcttgctcatatcaatagaaatctttctcttcacagcggcttttcaggttgaaaatgtacactttttaatgtctcctaaaatgacctcagctggtgggtggtatgtatgtgtttttttgtttgtttgtttttgagacgaggttttgctcttgttgcccaggtcggagtgcgatggcgtgatgttggctcactgcaacctccgcctcccgggttcaagcgattctcctgcctcagtctctctagtagctgggattacaggcggattccatgacgcccagctaatttttgtatgtttaatagagacgggatttcaccatgttggtcagggtggtttcgaactcctgacctcaggtgatccacccgcctcggcctcccaaagtactgggattacaggcatgagccaccacgcccggccggtggtatgtatgtaaaggctcaccaaatgcaggaataatattggtgccttgaaatagggccacagtcctctttcttaatttcccaaataccgggagttacttgaaaatgtacatttttttagtaacctgtttggcggcaaacctgtcttaatctgtcctgaggctacttatggtttttgtgtgtctcatttagtgtgactgtttatattttttgctgcagaaatactattatgttttgttattgggtggtatttgcaggatacatgcaaagtactccccttctaaaaatccaaaacaattacaaattctaaacacaactggccctcagggttttgaataaataattgggacttacagtgtgaatctttgtattgttttcagtaaatattttttcctttctggttttgtaaagggtatagtgttagtgcttaattgataaaagttatctttatggctaagaaagaactcctcaggaggataataattgacaaatccttgctcattgaaaagatggttttgaaaacaactgtttttgaatacccatgagtcttcatgtgcaagctgcctttttggaagatagatggctttcatgtggagaaacgtcaaggatagatggcatacgcactaacaattttcatctttttctgcttaaattcttttgggattagagttgtggtccatgatattttgagatagtgtatggtttttaaaaaatgtgatagcttttcatggagacattgaacaaaagctactctaagttaaatgaggtccagcaccaacgattttctcactacagtggacctttttttgtgatattgatctccaaatggtcttggttaatacttagtactaatacagtaagaattaattctcttcatggccgggtgtggtggctcacgtctgtaatcccagcactttgggaggccaaggcgggtggatcacctgaggtcaggtgttcaagaccagcctggccaacatagtgaaaccccgtctctactaaaaatacaaaaattagctgggcatggtggcgggcgcctgtagtcccagctactcgggaggctgaggcaggagaatcacttgaacccgggaggcggaggttgcagtgagccacgattgcgcccttgcactccagcctgggcaatgagagcgaatgaaacggaagctcttcatttatttaacaaaattccctatttgtaggttgttccatttaagtgttctaaataaagtgaagttgcctgagggggtgggaggatgagaaatgcttgtggaatccttatttaggtttgaacttggggttttcagtgtcacagcttgttttattttcaatgttaatgcaaactctcagaccaaatgcttctgtgctaatatctggatctatggtattacagaggaatgcaggcagtagttcagatggaaccgaagattccgatttttctacagatctcgagcacacagacagttcagaaagtgatggcacatcccgacgatctgctcgagtcacccgctcctcagccaggctaagccagagttctcaaggtaaaaaaaccttcatttttccttaccactcctcacatctggctgactggcccatcacattattttcctagttaatgtggaaactggccccttggcttggtgtagatgacagtgcaccagatgattggtaaaatgtagagtgaatgcagagttgtcaggtctttaacaatgcctctgtggggggctactatccaatctgtagacccaaaggaactgcggatggtataatggatagagacacacgtatgtcttgagtcatttgtttgtttgtttgtttgtttttttagatcgcagtgtctccatcagtaaaattggaatgttatcccttcactttctgtttgaatgtttgaggcttagggacttgaagtccagatggtatctgatttatggtggcttgatttaatttttttttttaactttacagtggtgctaaaacaatatgcattcagtggaaacttttagaattttgaatttcggtcttttcctgggccagtgatatgtgggccaaatattttctcatgttgctgagtggtggcaatgagccataataactccagtcagtgagccgtaactcccagtcagccatttgatcatgagggtaaaccagtactcttcagtgtactgtctttaataaattatatgcaatattcaacactttattaaaaataggctttgtgttagatgattgtgcacaattgtaggctaatgtaagtggtttgagcctatttaaagtaggctaggctaagctatgatgctcggtaggttaggtgtatagcggttttttttattttctggagacagggtcttgtgctctgttgcacaggttggagtgcagtggtgtgatcttggctcactgcagccttgacctccttggctcaagtgatcctcccacctcagcctcctgagtagctgggactacaggtgcacgccaccatgcctagctagttttctttgttttttgtagagatgaggtcttattatgttgtctaggctggtctcaaactcctggactcaagcagtccttccaccttggcctcccaaagtactggggttatagatgtgagccaccatgttcagcctgtaaatgcatttttaacttataatactttcaacttatgatagttttattgagacttaaccccattacaagtcaaggagcatctgtagtctcttggacttactcttggcagaggcccacttctaaaaccatgtttaactctggaatgtaatccaataaacacttgatagatattaatagttgtaccaaaatatcagtgtggaaataatggaattttgctttggtaataaggaattgagaatcttggggttggaaggtagtttgaactatctctagtgcatttaggcatctggggttagatttggagggtacccttgaccctcctggctctgctctggtattccctgaggaggaaagaaggttgcagctaatacagaaagccgatgatcaacaggtgataatagatgaagggaaaaaaactttaacatgttttgagcacttcaacagtgttgctttggttaattttttttttttttttttttgagatggagtctagctctgttgccaggcggagtgcagtggcatgatcttggttcactgcaacttccgcctcctgggttcaagcaattctcctgcctcagcctgcaagtagctgggactacaggtgcacgccaccgtgcccagctaatttttgtatttttagtagagatggggtttcaccatgttggccaggatagtctcaatctcttgacctcatggtctgcctgccttggcctcccaaagtgcttggattataggcatgagccaccgcgccctgctgctttggtcacttttatatgagtatgttgcacaatgagagaaaaaccatcagtttttcaagcaagaaagtgggaatatcctctttaacaactgttcctaactttatttttgaatttaggatttcagctaaagtattgctattgtctcttgatttcttaagctttaaatttttaccacaatgagactatggataaatagctactataactcaagcagtatgttatgtactaggaaccatgatagaaaaatcatagttcctgtcctcaaagatcttacagttcagtgcaagatacagatatgaaaattgatcatgggaatacattatggcaagggctgtgagaggggtttgcatagagtactacataagcccagaggtgggacagccaacttagggcagcactcccacaatgatgaagtcttttttgttgttgttgagacagaatctcgctctgtcgcccaggctggagtgcagtggcatgatcttggttcactgcagcttccgcctcctgggttcaaggaattctcctgccccagcctcccaagtagctgggattacaggcgagcaccaccatacctggctattttttgtatttttagtagagacagggtttcaccgtgttgtccaggcttgtcttaaactcctgatctcaagtgatctgcccgcctcggcctcccaaagtgctgggattacaggcgtgagccgccgtgcccagctgcacactgagatgtcttaaaggctctgataggaatttacaagttgaaagatgggaatatgttattctcggcagatggaacagcatatgctaaggaaaagacataatgtttgtaggaagtataattgaccatgccctagacacctgaaaactaaatattcaaaacagctaggaaatgcgtaagcactgagtctctttctggttatcatacctcatgaccacagagttgcacaactccaggggtaccatttacaatgtcagcaatgtaaggtggtcctccctagagcacaaggtagatcatattgtgaaaggaggccccttggagatgtacaaatggataaccttgctctgtgctaacttttctcacccgaaagtttggaaattttcagttttcttctttagagaatctataagatttcttcagattttttttttttttaaatatacgttggggggtgcagccgtgagagagtgaggctgacaccgcgccctggcctgtgcatcccgccctctgaaaaaaaaattaattaattaaaataaaatatactttagagaggattttgactgttctcaccacaaagaaatgacaagtgtttgagatatggatatgctaattattttgatttcatcattacacaatgtatacgtctatcagaacatcacagtatactctataaatatgtacacttacatgtcaattaaaacaaaactaagactgctaggggcttacacggagggaattgagccagcatcaccacgatggtgttgttggagagtgagcagttcctgacggagctgaccagacttttccagaagtgctggacatcgggcagcatctatatcaccttgaagaagtatggtggtggaaccaaacccgttccaaagaaaggttctgtggagggctttgagccctcagacaagtgtctgttaagagctatcgatgggaaaaagaaggtcagcactgtggtgagctccaaccaagtgaataagtttcagatggcttattcaaacctaccgagtgctaacatggatgggctgaagaaaagggacaaaaagaacaaaagtaagaagaccaaagcagcagcacagtaaagggcacaaatttcctgctttcaccaattaaccactgaattgttattttttcctttggtttttacttttggccacatagctaggtttctggttcccctacactaggtgttttcacataagatgtagggtccttttgcaaagaatagttgcaatgtttatagggcagttgtggtaagaatctagtttattttacatttggctaattggtctgtactgcatggttatatactcctggattatagattaaaagtctctgtagtcatctctgtgaagagcaagctatgattaaacatgtctctttataaaaaaaaaagcacaaaaaaactaaaacatatctacatatattttttaaaaatgctttaatttcagctttgaatttccttcatttcctttgtcctcaggttggagatataaaagggctgctgagtgcctcagaataggtttttctatccaaaaaacttaaaatgctgcattcctgctttacctttatgaatctattatgacagtgccagagagggtaataagaaagaaaaaaaaatcggccccttaagaaaggaaatcgttttgtttgttgttatatctttggtaatagaatatctgttttatggtgggttagaaaaagggaagaatgagaggatgcagttaatatttataaagcactctgtaccacggatcatgttaagtgcttcacatgcattatctcacctattcctcaccacagtgttatgaggaatgtgctactagtattttccttttcaataggtcaggaaacaggcttggagaaaataacttgcccaagatgccacagctagttggtatggtggagtggagttgaatcaagttcagtcctaattccagaacctaaacttattaatgctgtactacattacatctgtatacctgagctaggctcttttgcttatattttatttaattaaatagatattttaaggatttgttggattttgtgaaatatgaagaggaggaggagcgatattctgataaattatatggataggaagtaaaacagatttccatcttttttctttattttcttttaaaattgggatcagattccagtcctgttcgaaatctgcagtcttttggcactgaggagcctgcttactctaccagaagagtgacccgtagtcagcagcagcctaccccagtgacaccgaaaaaataccctcttcggcagactcgttcatctggttcagaaactgagcaagtggttgatttttcagatagaggtgagtgggtatggtatgacttagacctattacagagcatctgggtgaaattctttttaaggagggcttggggccactgcaggtagatgcctaatacttcagctagatgaatgctgtttgcttgcttcctttcttatgtctttttttttttttttgagacggagtctcgctctattgcccaggctggagtgcagtggtgcaatcttggctcactgcaagctctgcctcccgggttcacgccattctcctgcctcagcctcctgagtagctgggactacaggcgcctgccaccacgccaggctaattttttgtatttttagtagagacggggtttcactgtgttagtcaggatggtctcgatctcctgacctcgtgatccacccgcctcagcctcccaaagtgctgggattacaggtataagccaccatgcccagcctcctttcttatacattgctgaggacagtttgatatcagaatattctcaaggtccagagtagctggagtatattaaatcgtacctgtaataggaaaaagagactgggcccttcttaaccacatttgaaaagggcttgaagcagacttttcttatagccatacttctcagtccatttatctccaaatttcttaatgcagaggtcacagactggtgaactacttctagctgtccgcatggttggttggtttgcttgcacagtgtttaaaattttttaaatttgttgctagtatttgaaaacacaatgatttcatataaaaacctggattaatagtttattttaaacaatgaaaagatctgggaacactgggcggccaatcacccatagtaataattggctggagttgaatagtagttgtcccctttagatggacaatgagctgtctctttggccttgctgagcccctgtaggcatttggtttgcaattcctgatttagagtctggaatttcaagattgaattgttagactacaaacaggctcactcaagactctaagtccattcacatcttacaccaagcctgttcagtgtcatccagaaagataatcactgtcacttatcttctgtcctgtgtatctcctggaagggaagtgggatagtaatgttttaaaaacgtatttccatctagttttgattatccatgattagcaactcaggagaaatacagataggtgtaatagatgaagtacaaatttaattttaatcagaatttaaagttgcacaaaatggatggtgtagaagtgcctcttcattttccatttagccatctagcagatgaatagctgaaagttactggttaaatcatagaaaaagaacctgggaagcccataaactctgaatagtaaacttctaaataaatgaactccactcataacttctaccaattgcttttgctttagaaactaaaaatacagctgatcatgatgagtcaccgcctcgaactccaactggaaatgcgccttcttctgagtctgacatagacatctccagccccaatgtatctcacgatgagagcattgccaaggacatgtccctgaaggactcaggcagtgatctctctcatcgccccaagcgccgtcgcttccatgaaagctacaacttcaatatgaagtgtcctacaccaggctgtaactctctaggtcagtgtgccctagcttcatgacatcctttgttctgtggttctctctcccaggatcatccagaaatgttttgtgttctgttgggatttagcttcttaggctcttcagtggtcatgtgctgagtgataatgagttgctcacttgaataaaagcatttatcttcttggccgatggtccataataatagatctggttgtaaggaaattaactatgatgagccattcagtttatcctagagcttttcccagtgaaaaattccctcattttcctagcaaaagcaaaaaagactatctgcagatatcttactgcatggcacatagctcgtactcagtgaggactagttaaggataaggtagtgcagaatagtggttgcacggccatagctgttaaggaaatgagaaaaacatttcctgtcaagaggctgtgaaattaggagtacacatgagaccctggccttctgtaactttagtagcttaggttccttgctttgtgtacttagtaagtatgaacaagataaaatatttcttctgtgataaataagtatcttattatattcttatgagttttaccccttagtgaattactttagagattcttgtggtttgaaccttatttgtgcaccttcagtgagctgaggtgcaaatattgggcttaaggttttgtctagagttggaagatgctgattgggaggtaaggggcctttcactactgggtctacttctcaaattcaccctttgcatgtggctatcaagtttgaaaaaccgtagaacagagtaaattgctgcttggcaggccaacagtacacttcctgtagtgtgttttgtttgtttgtttgtttttgagatggagtcttgctctattgcccaggctggagtgcagtggtgtgatctcggctcactgcaacctccgcctcccaggttcaagcgattctcctgcttcaacctcctgagtagttgggattacagatgcccacaaccacacctaacttttgtatttttagtagagatggggtttcgccatgttggtcaggctggtctcgaactcctgacctcatgatctgcacgccttggcctcccagagtgctgggattacaggcatgagccttttgtttgtttttatagagagacaggggtctcactttattgcccaggcagaggtgcagtggcatgatcatagctcactgcagccttaactcctaggcttaagtgatcctcccatctcagcctcccaagtagctgggactacaggcacgtggctttcaagcttggcttttttttttttttcttgttttttagtaatgaggtttttgctgtgttgttcaggttggtcttcaactcctgggctcaagcaatcctccccactcagcctgctgagtagctgggactacaagcgtgagccaccatgcccagtggttttctgtagtgtttaattaatttggattgtttcctggccttttttttttttttttttttgagactgagtctcgctctgtcccccaggctggagtgcagtggcgcgatctcggctcactgcaagctccgcctcccgggttcacaccattctcctgcctcagcctctcgagtagctgggactacaggcgcctgccaccatgcccggctaattttttatatttttagtagagatggggattcaccgtgttagccaggatggtctcgatctcctgacctcgtgatccgcccgccttggcctcccaaagtgctgggattacaggcatgagccaccacgcctggccatttcctggtcttacagcagtttctcagataatttcaaaccatcggaataaatacagcaaagttgtcttgaactccataccagttgtcactcgaagataattgtttcaggcctgcattgatttccttggaataaataatgagaaaaactaagaaagacaatatattacactagtagatgatatgatggctaatgtgctttaagagtttaaggggatctgcttgccatgcatcaagaaaaggaattttcctctgcttctgcttgttactaaccatgcattgctaaattgttaattttatgtactatatttggtcattcatgcagcaaatatttactgaatattggtcatgtgccagatactgttttaagttatgargatgtagctatgaacaagtcaaagtctctgccctcatggagcttatagtctagctgagaaaggcaaatagatagacgtgtaatatatcaactggagataaatgctgtgaaggaaaatgaaactgggagtactgagggtaggatattgtgtgtgtatatacatacatatgtgtatgtatatgtgacatatatatgtagttggctaggaaaagctgctgtgatatggtcacatttgagcggagacttgctgttggaatatttgagaataagcattatgggtaaggagaacagcaagtgctctgggcaagagaatagttaaccagtttgaggaacacttagaggccaatatacctggggcagaatgaccagaacggagaggaggagataggtcagaatggggcctgattgtgttatttatgcccaggagttaacctcttaatggggtagaccatagggtaaataaaaaatatgttgtattagaggaaagtttacttgtatttgtttatttatttattttggagacagagtctcactctataattaccaggctggagtacagtggcgtggtcactcactgcaacttccgcctcccgggctcaagtgattctcatgcgtcagctgcctgagtagctggggattacaggcatgtgccaccacgcctggctaatttttgtattttttagtagagacagggctttgtcatgttggctaggctggtctcaaactcttgggctcaagtgaaaaagtttactttgactttggttttaatgtattggaactttgaaaaatatgaacccgagcttccaaagtatcctttttttttgaggcagagtctcactctgtcacctaggctggagtgcagtggtgtaatctcagctcactgcaacctccacctcccaggcttaattgatcctccaacctcagcctcccaagtagctgggactacaggcacatgccaccatgctcagctaatatttgtatttattgtagagacagggtttcaccatgttgcccaggctggtcttgaactcctgggctcaagtgaccctcccacctcagcctcccaaagtgttgggattacaggcgtgagccactgcaccgggccccaaaatattcttgaccctagtctattccttaagagttttatgtacttgtgaaaaattaaaactctataggaaagtttgaagtgcattaagtaaaaattgcccttaactcatacccgcagaactgtgccacagatacaaaacttctgtttgcagttttctatgaatgcttccaagaagtttttctacatatataagcacacgtatatgtacacatatttcctttttgtgattattcataaaacggaaaataggatacatttgttcgttgtacatcttggatatttgtatttagaggcttgtctttttaaaagatacagagaatttcattatattgatagtttataaattatttaaattgtctcattgacatttagattgtttctcatttttagcttttttgaacaatattgtaatgggtagccttgtatgtacatattttggtgtctttctagcaaatctgtaggataaattcagagcagtggaatttttaggtcaatagatcagctgttccttttttactgtagataatagattggttttatttaacatataaaagaaaacatgccctgaataaattactaagaagtatggatatgcctgggtgcggtggctcatgcatgtaatcccagtactttgggaggccgaggtgggcagatcacctgaggtcaggaattcgagaccaacctggccaagatggtgaaaccccatctctattaaaaatacaaaattagccaggcgtggtggcggcgcttgtaatcccagctactggggaggctgaggcaggagaattgcttgaaccttgggaggtggtggttgcagtgagctgagattggccattgcactccagcctgggcaacaaaaggagtgaaactccatctcaaaaaaaaaaaaaagacgtatggatacatagtatctgaaaagcaagtcttgcagtattaatgacattactttttttgagacagggtctctctgtcacctaggctggagtatggtggtgtgaccatgactcactgcagccttgacttcctgggcttaagtgatcctggcacctcagccttctgagtagccaggactacgggcatggactaccgtgcctggctaattatttttctttttgtagaaatggagtctcactatgtatgtcacccaggctggcctcaagctcttggaatcacatagtcctcctgtgttggcctcccaaagtgctgggattacaggtgtgagccactgagcccagctgatgctacattgtatgtatggtatttgatcagtgaggatggtttttcgtgttcaagataattttgcggacctctaaaattgcattttttttttttctgagacggaatcttgctctgttgcccaggctggagtgcaatgatgtgatcttggctcactatagcctctgcctcccaggttcaagcgatttgcctgcctcagcctcctgagtagctgggattacaggcatgcatcaccatgctggtctaatttttatatttttttaagtagagatggagtctcaccatgttggccaggctgacctcaggtgatctacctgcctcggcctcccaaagtgctaggattacaggtgtgagccaccgtgcctggccctaaaattgcatttttaaaatttatttattttattttatttttttgagatggagtctcgctttgtcacccaggcaggagtgcagtggtgcaatctcggctcaccgcaagctccgcctcccgggttcacaccattctcctgcctcagcctcccgagtagctgggactacaggcacccgccaccacacccggctaattttttgtatttttagtagagacggggtttcaccgtgttagccagaatggtctcgatctcctgacctcgtgatccgcctgcctcgccctcccaaagtgctgtgattacaagtgtgagccactgcgcccggcctaaaattgcatttttaataatacagtcccggagaaatgatggcctgaatgtcctaaaatcacccattcaccagtacttggactgttttttccttttaaagtttattctataaattatgttgtgtaagctttaaactccactttcttctttaccccaaattaaatgtcttttttttttttttttatgaaagatgaagatttttgtagacttgctattcaggttagctaactttttatctcattagcattgtcctatgacccctttcaatcttaggtgttttataaaccttttggttgaagagaaatatataaaaaggaaataatgttcaattccctgtgtgttttcaaaaaaaccaaatgaaaaatagatgaatgggccgggcgcggtggctcacgcctgtaatcccagcactttgggaggctgaggcgggcagatcacgaggtcaggagatcgagaccatcctggctaacatggtgaaaccccatctctactaaaaatacaaaaaattagccgggcgtggcggcaggcgcctgtagtcccagctactcaggaggctgaggcgggagaatggcgtgaacccaggaggcggaacttgcagtgagccgagatcgcatcactgcactccagtctgggcaacagagcgagactccgtctcaaaaaaaaaaaaaagaaaaatacatgaatgaagagatacccatttaaataaaacaagctttcgtgttttgttattcctaacatttttccgtcttcagaaggccttgtgttactgcctgtttcaggcgtggctcatgcctgtaatcctagcactttgggaggcggaggcaggaagattgcttgagtccaggagttcaagaccagcctgggcaacactgagacccgtttctacaaaaaattttaaaatgggcccagcgtgatgttgtgagcctgtagtcccagctacttgggaggctgaagtgggaggatcacttgagcccaggagttcaaggctgctttgagccatggttgcaccactgcattccagcctaggtgacataaaaaaattttttaaagtaaaaaaatctgattatagaagaatcctaaatctttaagcaaaactcagttctccctccaaaaaataagtatttaatctggtttaaagttatgtaagtatgtttacttatatgatagaaaaggccgcttctccatttttcataaatttgagtattgaaaggggttaaattcaggttggataacattgcacagtagaaagaaaagtacacttattctacatataacctgattaatttagtataggagagttacattccaccaaaagaaagtgttcctgttcatagtcttgggctttaattacaaatgttgacttcgtgacattttgagatttgagaagtctaagagcagaaagaattatagtttatattgatcatacataagcatgttcaaagactgccagatccatcctgtggaagaaaagaatgagtgtaagttatagccctaccagccttatgtttggtggattcagtctgatcagacatatatttgataaaaatgatgtagcaaaaaaacaggtttgtcttagagaaacatactactttctaagcttgtcttctttcttgagattaagttttccctcctttaacaggacaccttacaggaaaacatgagagacatttctccatctcaggatgcccactgtatcataacctctcagctgacgaatgcaaggtaattgtgctctcatttattcaacacatgcttattgagtgcttaccgtttgccaggcactttgctgaacactggggatacagtggccaacaagatgggtagggtccttgttcttacattgtagtggaggaaacataaaaaacaatgtgcttttttagaaaaaactagttaaacagacaaaagaattgtaatatgtaatgagtgctttgagagaagttaacaaggagattatgaaacgtttggaacatcagccactagtgcattgatattttctgttgaaaattggcttcgaagactgctagggacttattgcactaaggaataacttgcataaatatgtgatcttaatatttatgcattcggttctcttctcataaatctatgaagtcattttgcttttaaaaacctttcataattcttgttcctttttctgtccatttctgtgaaatactttttgttactctcagtcacacctacttttggctaattcatcttttaaattcttgaaacctagctcctaaataacctttgggattttgagataatgtatttaagtagaagctcagatcccatttgtgcgttcttgtgtgggttgctgttcccaaggatggaaccgaagatctaattatggggaagcaagagtggaaaatgttattaattaaatggattgcttgagtagtattggacaggttatctaagctggttagaccaaagtattattgttgtttttgttgttactttgctagtgacaccagggtcacaggtttattcctgtctgagccaatttcattgtgaggaaaattagattccctagctaacattaattttccttgattcagaatttgttctcttatttacaggtagaccgcaggggtgaaagtttcttttgtgtggttagtctttcagcaaagtagtgtactttccgtgcttatatggattttaaggtcaatgaccctactcttatttttcttcattccaaatcattttataagtggcaattccttctgctctgtgtaaaagtgagttgtagatcttcccattgtcctcccattattctgggactaaatcaaaacagaaaaagctgtgcccacatctatgtcagaagcaggaaaggcttcaggtacttctttctcagaaaataactgcgatccctgctttttgagagttgtcctctaccacttgtctctaaatacaatgatctgatactatggatggttttacataaaaatcttcctgagatgtcttttgcttttgaaattgttagtttgtagcaatatgaccatgtaacgttaagcagtttattttagaaaaagaaaaatttcagtttggtgaagaaaattctgaccaaaggaaaacatttctatcttgaatttatcctctttgttctctcttctttgcaaggggcattaggcgcagaataatccatctttactactggaacatgtgcatggaggatcaggagaatttctgagatgatatatttttattacatttagaaccctaagtggaaagattagacaaattccccacatttattaacagctctagtgtttttgaagaacctgcatatacatgattgctcttgagtttcccaggacacccttgcgatcagtgatgttacatttgtattcagtcatatatttctgtagctgcatgtgccaaatacaggtatctgaggattcagtgaataaaagactgcatttaaggagctcatgttctcacagggggaggcaacataaaccttcaaattaataagtaaataattttgtgtagtgataaatattgtgaggaaaaaaagacgaatgatatagagagagtctgtttcgggggtgagggtagggatagcactgcttttcccaggatggtcctggaagacattcctgaggagatggcatttgatctgggacgtgaatgatggcaaagaagcagttgtgtaaagatctagaagaaaagatatcttaagtagaagcaacagcaagtgcagaggccatgaggcgcggctaaactgatgggtttgagaggctgaatgaaagtaggccgtgtatggctggatccagatcataaaggaccttgtggaccttggcacaggagtatatttttgttctgatagaatgagaagcatttggggggctttaacaaaggcatgacaggatttcaggcacgcttttgaaaactgaagacttgttaacgtggagaatggagtgtgggggcaagagttgatgcagggtatagggtgcttgggaaactgcatggaagttcaggcagtagttggtggactggactagctttgtatcggcagcaattctaagactaggttggattcaggatacgttttagaggggagcaacccgttaggcttgctgattgatttgatgtgaggtgtgagaaaagagaagaatctaggataacattcaagttgttgactggatcagctatttagacagtattgccatttattaatactgggaagatttggggtagagcagatttgtggagaaatgccagtcgttctgttttgaccattctgagttttagtggtgaagtggaataagcagttggatatcagttcccaattcccagattatgaaacagaaactgttgagagctgatgtgatttgtctgaggtcatgtaactacagaattaagtttccctggagacttgaacccaggttttctttttttttttttttttttttgagacagtctcgctctgtcacccaggctggagtgcattggtgcaatctcagctcactgcagtctcagcctcctagattcaagcaattctcatgcctcagcctcaagtagctgggattacaggtgtgcgccaccacgcctggctagtttttgtatttttagtaaagacggggtttcaccatgttgcccaggctggtcttgaactcctggcctcaagtgatctgcccaccttggcttcccaaagtgctgggattacagatataaggcactgcatgtggccaagcccaggttttctttctttctttctttctttctttttttttttttttaagacagagtctcactctgttgtccaggctggagtgcagtggtgcgatctcggctcactgcaacttctacctcccgggttcaagcagttctcctgcctcagcctcccgagtagcggggatcacaggcgcctgccaccatgcctggctaattttttgtatttttaatagagacggggtttcaccatgttggccaggctggtctcaaactcctgaccttagctaatctgcccgcctcagcctcccaaagtgctgggattacaggcgtgaggcaccacacccagcccaaacccaggttttctaatgttttctttgtacttccatactctattcttgcacttcctcatgcttttttaatttatttattgtactttgagaagagtccaggctcagagtcatcagacatgattaaaaccttagtgatcccatcatttagctggatcatttcaacttctctgatcctgttattggctgagaaggcagaatgtgaatcttgcattatctctttcttgtagagattgtgacaataagtgtgaagaccctttgaaagtaaagtacaacataaatccaaggcattatcattgtattcttatgctttaagtaaacgtagtcttagaagcaggtggatttattgacgttgttgatggttgcaggtgagagcacagagccgggataagcagatagaagaaaggatgctgtctcacaggcaagatgacaacaacaggcatgcaaccaggcaccaggtatgggccttgttaaagcactggccattcatagtttgaggtccgtttcttggatctcctctataattgtcttcaggcatgtctgtgcctcatttcctgtggtatatcttccagatgtaaacttagaatcatgtttgtttttcaaacagtaaattttcataaaacaaacacttctacctcatgaatgaaggaatcatgctatctacagtagtagtaatagtagtagcagtagtagtagtagataattctgattatttgaaagattacacttgctgcttcatttcctcacttcgcatcctttaagactattgtagctttcaaacctctccactctgctagcacctttccaaggccaccagtgacttttccccagcatttgacacttgctgactgtgttatttgtcttctacttatctcttcccttggtttgtagggagcatcctggcttggtcctaaacctcctcctgcctctctgaacattcctgccacattggttcacttacttccttgttcttccctaaatgcctttggtcttcactcttcctgttttcctgcctggaacgctatacctgtaccaagaacagatggtattttctttcaaggcccgtgcagttctcagctgttggaggaatttttcccaaattctctcccaccgttaaggaatttcttccttatgtattcccattgtagtgctctcaaaatgttagcctttgtgacatattatattttgttcatcatttaggtgtctgtttttgcagttagattatagttggatagcagagatatatggtgatgaggaagaagtttgactttggagccaaacagatgtgaatttgaatactgattatttaactctagctatgttgtcccgggcaggtcaactaacctatttctttgttaataagaagaggtgaataatgcctacctggcaggggagtcagctaaattatgtatgtaaagtacctatacccagtgcttggcaggtaaaaagcactccataagtggtaactacacttttcttcgttgtctatcttaggtttaatttaatttaatttatttattttttagacagagtttcactctttttgccccggctggagtgcagtggtgtgatctcagctcactgcaacctccgtctcccaggttcaagtgattctcttgcctcagtctcccaagtagctgggattacaggggcacgccaccacgcccagctaatttttgtatttttagtagagacagggtttcaccatgttggccaggctggtcttaaactcctgacctccagtaatccacctgccttggcctcccaaagtgctgggattataagcatgagccacggtgcccaaccttgggttttattcttattcagtttttctatttaaattaatacatataaatgaatttttgtaccactgttgatcagatcaataagcattaattggaaaacagtaagcattctataaatgattagttgaaatgatcttaattttattcttgttgctttggtggagacgtctatccttagtttatgttagtagtaaaataagtttgtattcctgaacctatatttaactggcagtaaaggtggtgggtgatgagaacctgatttggaatttttaaattgccatattcatgaaaaatttagctgggcgtggtggtgtacacctgtagtcccagttacatggaagactgaggcaggaggatggcttgagcacaggaggtagaggttgcagtgagccgcgatcgtgccgctgcatttcagcctaggtgacagagcgagaccctgcctcaaaaataatacaaatgaataaaataaaattgccatatgatttgcattgtggctagaaaatttctggcatttttttctctttaaaatttttttacatgttttggtaccttcttttttttttttgtttttgtgccagagtctcgctctgtctcccaggctggagtgcagtggcatgactggctcactgcaacctctgcctcccaggttcaggtgattctcccacctcagcctcccgagtagctgggattacaggcgtgcaccaccatgcctggctaatttttgtatttttaatagagatgaggattcaccatgttgtccaggctggtcttgaactcctgatctcaggtggtctgcctgccttggcctcccaaagtgctgagattacaggcgtgagctactgtgccgggccttggcactttcattttgaagcttagctttataaggagttttctctcagttttctcctttttccttttaggcaccaacggagagrcagcttcgatataaggaaaaagtggctgaactcaggaagaaaagaaattctggactgagcaaagaacagaaagagaaatatatggtgagggaaagttaaatatttaatgagcatgaactcctgctatcacatttgattccttttgctttctgagcttctgcctttcagatttgccatttagtattctccacatgtgaataccaattgactcttctatggcacttagagtttatttcatcccccaaaactgaattgttgagagtggaaacaggaggtcttgggaaaatgaaatacaattagaatttaaattttaaaaaatttgatcctctagttgttcataaattttactttcatcttaaagggttaaatttacccgctagaacacatgccatggcactggaaatgtctgtatgaagaaaaatattcaagcttaatagtagtctgcttattttaatggaaaaatagatttcctccatgattaaaaggtattaattgggtgaatattctgtaatagaccttcttgtagtattttaacatttttttctaactttagaagtaatgtacatttgtaagagaatttagagtgattaagcaaagtatatggaagaaaacaaatcctactacctaaaaatagccacagttagtgtttttggatatatcctagctttttcacaatctcttatttacataattaccttcttactgtatgtagcactttgaattctgtgttttcgcttaaaaatctttttttttttttttttttttgagacagtcggccaggctggagtgcagtggcacaatctcggctcactacaacctctgcctcctgggctcaagtaattctcccgcctcagcctcccgagtagctaggattacagacatgtgccaccacgcccagctaatttgtgtatttttagtagagacggggttttaccatgttggccaggctggtctcgaactcctgacctcaggtaatctgcccacctcggcctcccaaagtgttgggattacaggcgtgagccaccatgcccggccttaaacatctttttttaggaaaagattttattataaatgtattaatacatgcttactactgaaaataccaaaaatatagagaagaaacattccaataaaaaaaaattgtccttcaagatacaaaccactgcttaacattttgatgtgtgttctttcacagtctttttctttttctttctttttgagacagagtcttgctctgtcaccaaggctgaaggctggaggctggagtgcagtggtgcgatcttggctcactgtaacctctgcctcctgggttcaagcagttctctgcctcagcctcccaagtagctgggattacaggcgcccaccaccacacccggctaatttttgtatttttagtagagatggggtttcaccatgttggccaggctggtcttgaactcctgacctcgtgatccacccgcctcggcctcccgaartgctgggattataggcatgagccactgcacccagccttttttttttttttttttttttttaaatttatttattttaaattttagataagggtgtacatgtgcaggtttgttacatagatctattgtgtgatgctcagatttaggcttctaatgatcttatcctgtcacccaagtagtgaacatagtgataggtagtttttcaacccttgtccgcctccccactcttggaatcctcagtgtttattgttcccttctttgtgtccctctgtacccagtggttagctcccacttataagtgagaacatgctgtgtttggttttctgtttttgtgttaatttgcttaagataatggcctccagttgcatccatgtcgctgcaaaggacatgatttcattcttttttatggctgctcttttagatttttttctgacattttagtttttttcatagaattggaatgttttcttattcagccattgggatagattcttaaacatagggcatgtgaatacttagtcagagcatggcttcactaagacaaaaatatgccagactatgcatagttgacccttcgtatccatggattttgttcctgtggattcaaccaaccacggatcggaaatattccgggaaaaaaatgtggtttgtactgaatgtgtacagactttttcttgtcattatttctgaaatagtagtgttaacagctatttacatggcattgacatcacattataagtaatctagagatgacttaaagtatactgctggatgtgcccaggttatatgcaaatatgacatcatttacatacgagacttgagcatccatggattttgttatatgcagggaggttgtgggggcgttcctggaactggtcccccagggatatcaagagatgactgtatttccttttttttttttttgaggcggagtttttgagacagagtctcactctgtcacccaggctggagtgcagcagtggtgcaatcacagctcactgcaacctctgcctcctgggttctgggttcaagcaattctcctgcctcagcctcctgagtagctggaataataggtgtgggccaccacacccagctgatttttgtaattttagtagagacagggttttaccatgttgcccaggctggtctcaaactcctgacctcaagtgatttgcccacttcggcctcccaaggtgctaggattacaggtgtgagccagcacacctggcctgtatttacttttttgacagtcatcactgtcttaaatgctaattttatgaatacatggacataggccaatgtaagatgggttgtggggtgaatttgtagttagacctttacaccagactgtgttggtttgtacagtgagggctttagtagtgggctatagggtaccagattgtttgcttgccccagtcttgttcactgtttccatctgcaaacttgttagaagggtaataagacaatgataccgtatattgagtgattagtgctaggcactgtgattgtgacgttcctttgatcttttaacagtccagtatgattggtgatatttcccatattttatatacaggaaaactragactgagagaggtaacttacctaaaatcatacaggcagaaagagtgtctgaagtaaaagttcttgaaatttttaaccttaacaaacatctgctctgctttttagtaatttgggataggttattaggacccaacctccttgattaaaatgctggctaggacttttttcaagcttttttttttccagtgttcctcaaaatagaagaaataactaatgcgtagaacccaaatcttagatgatagagtccaaatttaaaaagattcacagcagatggaatcagattaaccggaagaaattttaatagggataaagatactgatgaatgrtctcttcatatggtaatatgtgtgtgaaatctataatgttttcctgagataagccatccactccacttaactaccattatctcctattctctggatgggaggtggagcctacaacagagtgggaagggctgaaatcaaaggcttaaaagggaagtttcctttgtagaatctctttcctggaaaggattcttgtagtgactgccatggtaagattagggaattatttaagactggattattctcatgcttttaattttctatggctttcacctgtcttattcttgcttaatatttagtaagtcatttttagagagtccagcctatttttctgtgtatgtggactggagtttgagggtagcacgccttttgcagacagcataatggtggctggagcaattcaagtgaaagaagttacaaaggactgcttcatccagctgcccctgcccctcccttcctgcagattttcttttgagtctaaaatcttagacactaaggcttagaaaatctggtttttgtttgttttgtttttaaatcggggagtatctaccaaagctccttccaaatctcaggattctgggaatttgtagtgtctctgggtttgttgtactttatttatttgtactgtcatgtaaatttttacatgaaggaacagcgttctgatccacaaagtgtatcttttcagagatagaagaatgaagctcccttctggagctgtgggagcatttcctctccagaatcactggggtgggtagtgggagtcttgtggcattaacctgataagtagtatgtcttgtgctcaatccctagcacctagtatgtaggcactaaataaatagcttatggttgtgtggtttgcatggattgaaatgaaatagattaaaaagttcttagaagcagagagtatcagagtatcacgctctggttattttcctaggaacacagacagacctatgggaacacacgggaacctcttttagaaaacctgacaagcgagtatgacttggatcttttccgaagagcacaagcccgggcttcagaggatttggtgagtattaaaacctccaaactgaaggccgcttgtgaaaggtgcttagagttgccaggaaaaatgattgcaaatcagtttgatgggaattaaatgtaccttgcttctggaatctctttccctgtctcccagctgtccctttttggagactagccttccctttcagatttaaaatgaatcacccctcctcccttcctttttttattccctgctttccacctcggctcccggaagtaccagtttggctagagctgatgaggctggataaaaccataggcgcccctttgtctcagctgggcaatttgcaattctgagaacctgtagcctaggagagactcatctctgttgttttcttaatcccaacaggaactccccttttgctaggtttcctctgcactaagaatgaaaataacagtgaagaggaataatggaaaaggctgttgtcagatgttttagaattaatctttgacacagccaagtttgatacattggttttccattctgatatttagagctagtttatactgagttgctgtcctaggcagaatttttaacaactttgcttgaagaaaattctggtgattgagtttacctctgatataacagattaaatgtgttcagggaagctcagttttaaagtgaatctcgtcttcacccccttcccccttgtattaaaaaaaaattgtatcaaatactagacttgttgaaaacttggcagaggcagggtttgctggctacccttggctgggatgggctgttactgctgctggttttctctatcctattctggcatggagcatttcctgggctagccttttacaactttacacctggttatgcttacaaattatacttttgtagccaactcagagccactgaatggagatggatatccgaattttttttttttctgagacagggttttgccctgttgcccaaactggagtgcagtggtgccatcatggctcactgcagcctcgaccttcagtgctcaagcgattctcccacgtcagcctcctgagtagctgggactacaggcatgccactacacccatcccagaaatattttctgccttctagagtttagattctagaattatcatgcacatttcaaaaatattttttaaagggcctgtttttttttctaagtgaccattgtggatatatttcacggagattcatatagctttataaaagcttctgcagataagtaaggcagattctaaatcaagttttttgtttagttttagaatactttataagggtggggagtttgtatctgtgatgattttctttataattcagtttggtctaggctgataaaaatgaagtttccaaggtatcattctggtgaggcccagaatgtgggaggtagcagagaaacctctcttttgagacctgtgctctgggcagtatgggtagtaagttttctgtacacctgtgtgatttttcatgtagctctctttagtgtaaattctcatggatagaagccaaatctgtctgatttttttcatagcctagcgtggtggcatgcacacacacttttaaaaacaaagataatatttatttttttaaaaaggagtttcgctctgtctcccaggctggagtgcagtagtgcgatctcggttcaccgcagcctctgcctcttgggcgattcttctgccttagcctcccaagtagctgggattacaattgtttgccaccacaccttgctaattgttgtatttttagtagagatggggttttgccatttcggccaggctggtctcgaactcctggccttaagtgacctgcctgcctcagcctcccaaagtgttgggattacaggagccactgtgccctgtctaaaagcaaagataataaattctgatcctcctttgacttttgatttcttggcaataggagaagttaaggctgcaaggccaaatcacagagggaagcaacatgattaaaacaattgcttttggccgctatgagcttgatacctggtatcattctccatatcctgaagaatatgcacggctgggacgtctctatatgtgtgaattctgtttaaaatatatgaagagccaaacgatactccgccggcacatggtgagttgtcttgggttcctctgccttgaccatgatggcaataagctgtaggatctctagattttgccatagcgatggcatctgttcaggcaccttctcagtggtcctcagcagtgggatgaaggcataggaaatgacaggccacagcttaaggcggggtatagagcctgaggtatggcttgtgctgggtgccacccaaagcagctgagggcccttacccacatcctgtcatgtacatcttcttgtcttttgttcttgctgcctactgctcttcatttcctccttggaatatgaattacctctgcccacaggttttgtgtgtcccaaactagatgaaaatacagacttcattaggcacagcagagacagcatggctcaccttcatatccctagcaactagtgtggacaactgatgcccaagaagtatatgttgaatgggtacttattaatatttaatagtgatcagcctgtgacagattatgaaagtagcagagtgggtcctttggtgccttcccctctttttcctaataaaacaggtataaggagttgaatctgttattgttgacaaataggtttactagattttttgcagcttcaaaaaaaaagccatttttcccccgctctgttacagaataagctttgtcttaaggggaatttctgccatggagcaagggtgcggaacaggggaaggagtagagattagcctttcaggcagagaagactttttcttgtttttttttttttgagagggagtcttgctctgttgaccaggctggagtgcagtggcgcgatcttggctcactgcaacctccgcctcccagattcaaacgattctcctgcctcagcctcctgagtacctgggactacagtcgcacaccaccacacctggctgatttttgtatttttagtagagacagggtttcaccatattgaccaggatggtcttgatctcctgacctcatgatccacccacctcagcttcccaaagtgctgggattacaggcatgagccactgtgcccagcccttgttctcataatcacaatataatttggctctaaggcctctggggtgtctctttttccttccccttccttttttatttcccaggatttccatatgttgagcatctatgacccaggtttcctgtgatttctgtcattatactcttctccccagtttggttggtgataactgcttttttatgttcccagttcaggagcatgtggtctgtaagttcagggcccagaactgttgctttgactcaggttctccagaccctggcacacttgactgcatagggctagagtcatggaggggaggtgattggcggcgattggtagaaatatcagtgcacaggaaataatggggtcagaaggtggggcactgatacagatggcaggccgtggagataaagtaaaatggttttactgtgtgaaagcgggtatttttattgatgtgaactgcttaccatttatgccttttttccttttcgtttctggttgttgagtgacacaaaccaatgaaatagccaaaagggcaagaaatagtaatagaaggagaaaacaaagagtctgaataaatctgagaatcaaataaacattctgaatatttgaaaatcttccatattatatgatataaaaatcagatttcaggaaatacctaatttattccatgcctgttcttattcccgttgcttcaggtgtgatcactgaaatgaaatgatcttcctttggcttggcttctgtttctgaacaaataataattgttacatgagtttggttattgttgggaagagccagcatgagtaaaggggtagagataggaacaaactacagatggaattttcttggatggattccagttaataaatatttggatttacatatgacaaattggaacatgcttcttgagttgacaaaaagagttgcagtaaatttgcttaatagaaagtgtttcatgggccaggtgcggtggctcatacctgtaatcccagcactttgggaggctgaagtgggaggattgcttgaggccaggaatttgagaccagcctgggcaaaatagtgagactctgttgcttcaaaacccttttgaaaaattaactaaccaggcatggcgccatgcgcctataatcttagctacatgggaggatcttttgagcccaggagttcgaggctgcagtgagctatgatcgtgctatttcagcctgggtgacagagtgacaccctatctcaaaaaaaaaaacttttttttatacgtctatactttttaaacacttttttcttttttttttttgagacagagtctcgctctgtcacttaggctggagtgcagtggtgcaatgtcggctcactgcagcctccacctcccggattcttctgcctcagcctccagagtagctgggattacaggcccccgctgccacacctggctaatatttgtatttttagtagagacggggtttcaccatgttggccaggctgctgtcaaactcctgacctcaggtgatctgcccacctcagcctcccaaagtgctgggattacaggcgtgagccaccgcatcaggccttaaacattttaaaatgtaaaccttttgaagaattcacctaacagcagatggctggctggctggctgcattaaaacagtaagcacttgagggtgaggaaaagggggtactttgtgctcccttgtggccaagtgaccctagcttcctgctgctcagctaggctgcttgccttttttttttttttttttttttctttttttgccacaggactttctcttaatttccttatataacaaagggaatgcacttgcaggggagaagggcagacaggtagtggtacatggtttttatcattgtgagtgggttttctaatctgaacaaagaaggccatcatggttaggtggtaatgagaagttatgggtaaaggtgagagtaaagtacttagccaccctaagctgctggaaataagctgcttaagaatttcctgttggcttgaggcatttggtaataagcaagcgtattgttatttatttggcctttatgtagtgggtgattttaatctcctgggctaaagtagtgccagaatgtaatccagaatactwgttccagattgctataaaagtgtcataaatatattcaaatgactttggaagcctttgttttatggaaataaaatctctgttttgctgtatgttctcagcttgtccaactgtccggtagctcagttaaccacatttgacctgtcattccttttcccttttgaggagcagtcttgttgggaggctttggttccctgatgtgaatttcattgtcttgcaggccaaatgtgtgtggaaacacccacctggtgatgagatatatcgcaaaggttcaatctctgtgtttgaagtggatggcaagaaaaacaaggtaaaaagtggtgactttagaaaggagttgaaatgttgtatattcacaggtttcagaaggcatatgttttttctccatcacaccttgtgaaggacatagaactcttctcttgccaaaatacacaatgtgtttcattaataattatggtatgtttgtgaattttaggcctttatctgtttaggaatcagtggcccacacatgaactctgtttctctgcttccagatctactgccaaaacctgtgcctgttggccaaactttttctggaccacaagacattatattatgatgtggagcccttcctgttctatgttatgacagaggcggacaacactggctgtcacctgattggatatttttctaaggtaagcaggatctggagattaagaagccaatggccagagcagggtgatccatgttcgcagttgggggctcaaatcactgacaggaagaagctgtactctgggcaatgatgacaccccttccttaaattaaaaaaaaaaaaaaggcaaacccatgtatcaaagattgtttaatgaaaatgcagtttttattaaaagcttctggttcattcatttctagaattgtggactggagctgcctattaataactggccagagccctccctagtaactcacaagcccacatcttgtagtcaaaccagttctgctggctttgcctgcctctatgttattagcttaaaaccaggaatatactctttttgcctgattgtttagctgggctccttctagcacagtgccttcagtgataacactactgcgccttttaaagacccaaggccagattttttttttttttctgacagagtctcactctgttgcccaggctggagtacagaggtatgaccttgactcactgcaccctctgcctcccaggttcaagtgaccctcctgcctcagcctcctgagtagctgggataacaggcgcctgccaccacgcccagctaattttttgtgtgattttagtagagatggtgttttaccatgttggccaggctggtctcgaactcctgacctcaagtaatccactcgccttagcctcctaaagtgctaggattacaggtgtgagccattgcgcccggcctaagtcataaaagtttatgacttttagtataacaactttattgaaatataattcatataccataaattcacgcactgaaagggtacaatttagtggtttatagtgtattcacagagttgtgcaatcaacccagtttgcattatcctgaaaagaaattgatagcaatcactcctatttctactcaatccctctcagttcttctttctctataaatttccctattttggacgtttcctacaagtggaatcacacattttgatttgattcaatgtgattttttttttaatccctttgcagaatggggacttacagtggtgtttccttcccttctcttccagtaggcagctccttttcaaaaattgcgtttaaagtgggcttctatatactgagtcagcagtcttaaacttcttgccctactctgtggctgtcaggagcccagagtcagcctccttaaaatgacactggaggtctcaactagggaaatcctgggatgattaatggctttggccatgataaagggtgtggttataacagctgtgagcctggcagccactccttgggactggttagccagatgttttgcaagcagccttattttgcatctgtggaagtgctgaaacctttggtttcaaatcctcatgacgtgttcatctgtttgctcttgattttaggaaaagaattcattcctcaactacaacgtctcctgtatccttactatgcctcagtacatgagacagggctatggcaagatgcttattgatttcagtaagtgaaactgctaagtcattagttccacaaggcagggaccatgtgaatattgtttgtctttttgtcctgtggtctctgcaattcctggaatatagtgaaggtacatggatatttagtaaatgaatgaacaagtaggaaaaacctgaacattgtcattctgcctaatacacattgaacattgaaggagtacaggactcctccttaatgagtaggaggtacagaggatgataaagtaagctctttaggattatcccagtttgagacttttaaacagcacatacatgcatgaggcttaaaatctggtccttgatgctagggatttcacttttgtagggacttgtctagaggtaatccatgtacccaatggaccctgtgcataatatactctgccctcattaattgtggattctgtctttgtgaatttgcttactcactaaattttatttgtaaccccaaaatcaatcttaacatttttgtggtcattcgtgaacatgcacagagcagcaaaaagtaagagtcatggatgcacacattcccagctgacttcagagttttcagctcttacactgtaaacaagttcattttcagtctgggaatgccacatggttttcgccttctgttgattttaaatggsccctatgagtagtactgatgtgtctggtgttcctaatctcaggaatacctggggtaccttacaggggttaggtagctttcttcaggtgaattagagagttgctggcagtgagttcaatgttaatgatatcaacagtgtatattaaataaggcatttttaaacagaaacataaaataagtttatgtattgatggttgaccaatatgtgaccagaggcttgcaggaacctaaccctccctgtatttcccgtaggagtagtggttcaatattcactaattcaggttctcagtgactttataaaacataactgctgtgaataacaagactctactgtgtgttattctatatttgatgtccactgtcataggacagggtatattgtaatcaaaattggaattcctagaattagccttccaagccttctttctttctttctttcttttttgagacggaattttgctcttgttgcccaggctggagcacaatggcccaatgttggctcactgcaacctccgtctcccgggttcaggcaattctactgcctcagcctcacgagtagctgggattacaggcatgtgccaccacgcccagctaattttgtatttttttagtggagacggagtttctccatgttggtcaggctggtctcgaactcccgagctcaggtgatccgcccacctcagcctcccagagtgctggaattacaggcgtgagccaccttgcccggccaccttctttcatttttaagtcacctgagaagagatgaactgggaagtgacataagrggggaactatatatctttgaataggtaacactgttcttataaacttgattttatagaaatttttaagcattaacaaaagtataataaatgcttctatacccatcacccagcttcagtaattaccgttttttggggggctaatcttgttttacctacattttcacttgccattattttggtatctctaaaagataaggtctattacaccttaaaaaaaaaagtccttcatgtcataaattgtgatattcaaatttccctggtgtgattttgttcttttttttatttttatttttttaatactcagatccaggtagaattgatagtgggattgagaaatgtggctcataattcacttttagtctaaaactttccactcccatcatttttttcttgctgtgtttttgttgaagaaagcaggttagttgtctaaaagggttccccagattatgaactttgcacactgcatctccatagtgttgttttatatattttgtataaattgaatgttaggtgtttagactttacaactagaggcttcatcatttgggttttttacaccccgcactatctcataggtggtactgagctaatctgttcttaccattcaaagatttaaaaaatacttaaaaactaggtagtgaagtggcttcacatttttgtttctcatctcccttgtttccaacacacacctacagagattcattatcaaaataatggtgaaggcttccagagttcttttagtgcctattacagtagtgccctccttatctgccatttcactttctgcagtttcaattacctgtagtcaactgcggtccaaaaataggtgagtacagtacaataagatattttgagagacagacaaccttcacataacttttattacagtatattgttataattgttctgttttactattactctcttcctgttcttaatttataagttaaactgtagcatagatatgtgttgataggaaaatacatagtatatataggatttggtactacccacagttttgggcctccactgggagttttggaacacattccctgtgaataagagggractcctgtgtcatgtaaatgcaaatacacattcttccccttttgtttatacaaaggcagtatactatagttaaccacacagtattccattgaatgactaaatcctaatggagtggactgtgcttcttaaaccttcttccatgttggcacacagttttttgctattaggataagatcgagtgttgctagaaaaagtctgtatttgttccctggcaggttatttgctttccaaagtcgaagaaaaagttggctccccagaacgtccactctcagatctggggcttataagctatcgcagttactggaaagaagtacttctccgctacctgcataattttcaaggcaaagagatttctatcaaaggttggtttttgactccttggaatggttgattgttacccaagaagttaactctactgggtattgtgtttcccctgaatgtgagaacggaaggcccactgaatatggaccactgcggagaccctcactaaagctgcctaggaatccaaagcatttggcccctgggaatggttattaattggcttctcaaatccagagttgccaacactttaattcttataaaagtcaagaagcaaaacttcagatcgtttggttcatctttctgagaaagacatccctgtgtatttatgcaagggtggaacaatttagtttgatctatatttgatcctgatttctaaggggccargagtagcttcttgctgtaatatccttttgtggttatttggactggtcaaatgaatactttgtaaactccttctaaacagattgggttgagtacagaagattctgtccatttggatttcctttaagggaaagtagaccttggttgggggcaaaggggtgggaacctgcactttggccaggttgtcagtacttcttctgtttcagaaatcagtcaggagacggctgtgaatcctgtggacattgtcagcactctgcaagcccttcagatgctcaaatactggaagggaaaacacctagttttaaagagacaggtaaggttctcatcaggggcttgctcattgctggatgtccttcaagacttagcagagcaaagtatgggccttaagactggagaaccttcccttaaaggagttgggctacacgccccttttactgggtctcatttctgtagctggcagtgatgcctgtgttgccttatccttatcagaaggttttgataagctcctgtctcaaatttggatgacacaagttaagcagctccagttaagcagctttatgttgtacagcatttctgtcatttgatgtttttcttaggtgggaggaaattgcccatctgtagaggaatcttcacaaatgctgtctcaactcaaactcacatctaattttttaaattatttcatatatacaataaaggtcggtgagcgatgattttcatttctcactgagggtaaagtaggaagaatggattagataggaaagcagtttataagtcaaaatatagtattttttttgataccctaatatgttgttaaacctttggcaattccttcttggcggttagttattttggaatctatgtaaaggcacttgagttgaaagtatgtaatcctttttcccattgttctccctcaggacctgattgatgagtggatagccaaagaggccaaaaggtccaactccaataaaaccatggatcccagctgcttaaaatggacccctcccaagggcacttaaagtgacctgtcattccgagccagcgaaccccagcagtaggaatccgtaccctagggatctgtctgtcatttctctgttgctcttgtgattggcaagtacagtatcctttgggaaggccatccccctcaggactgtcctggctccgacctttgtgtacactgcagacgctggttctgaggaactgttgtttcggcctcagtgaggttgcctggatgggatctgtattagacttgagtgcaggtctctcagcactgacccaaggagttctgttatggtactgtacctgtccagtcactggttctctcctcatgtcctctcgccccatgaggttgtgttgtgtcttctaagcgtggtactagtgcttgccacctggtcaccagacctccaaatatggctgccaccaccaggacctttccagttactccttatatgtgtgttctatggaggggcagggaaaaggtggcacttgtgagtgtgtgtggattggcagggggtccattcactttgggttccatcttgctttaaatttcttcattttgattaagagacctctttttgatctgtattgggctaaccagagccaaatacttttgaagagtttcccagggactagtcatggtaatagcatataattgatctgaatgagatggagagaagaatgaaggggtggtggttctgggtttgatttgagttcacctgtgggcagtgggcagtgggcagtgtcttggtgaaagggaacggatactactttttgcctcaccgtaaagtactcactagtaaatatttccttctctctttactcccactttttacgtttgcaggtgccaaagtaatgtccacttttccctttcatgctgcatattaactggttaattatactgcagaaaccttttcacctccactagtctgatacagtacatctgtacttccatataccttgcactgattttgtctgagtgccctgggagaagtagaaaatgattgaaagtgacttccgtatctcagcccatgactcagcaaggcagaatggccacccctgccaaagtttgcttctcttttcaacagtgcctcaccctccctctaggattaaagtgcttctgcccttccacgaactcctcctccatttcctttttgggatttgtcaccatccttctattctctggtcttctatttttggtgttgttcaagtgaaggaagagatgttccctctaatttctctctagcccattataacctgctatcttggggcaacttttgatgtatgacatgtcacccttcccaacttggtctcctccaacatgctgtcttcatgtggagccctcaccacaatccctgactccggtcatttgtgcctttctcttgtcatctctgtacactacttatattcactgtgggttgggggagctaattttaagcatgttcagtggcagctcccctccagtttcagtgtcactgttaaaatttatcaaaaagcaacttcactaggggttttcttaagggataaaggccttttacagaagctaaacccttccccacatgtggtagaatgtgctcttctatatctactcctcaataaagcatgttctctgctcaagtctgtttcatctgggggctctcatttatatatgaaaatgatgcacacgatctgctactaatagtaaatgcacttgggatttgctttccctagcagtaaactgttgagggatgtggtttgtggctatggaatgtttttccctgtgatacaggctgtctgtaaagatcaagggagtgctcactctgaacttctctagatggtggcacaaatttgatctgcctcactttggttccagctaatcagtatacgtagcaatgattagtcagtattacccattctttcactaagtgccattttccactgattttaggggcaaaggaaccaataggaaattaggatatatgggggtacagttgatgcctgtaggagatgggaacagacattccttctcatctccaagctcattcaccagtattgagcagtgtcacctctaattattgactctctcgcaggttgaaattattctttttgaaaatagctgcattttcatgtaagatatacccagcacaggaaaagggtggctgagcactaacctccgtatggtggaaaggaggaggctgggaattgtatgtgctggaatggtttcactcactgtgaccagtagtggtgagaacccatacagttgaagttttttgcacagtcctgatcccaggtctccactcgctttgccatcccactttactccctaaaaataaaaggatttattatctcatttaaacccccacaggtgtggaaacagagtttcacttgccttggcaactttgcatgagactatcccatttcattccgtttttttttttttgagtcagagtctggctctgttgcccaggttggagtgcagtggcgcagttttggctcacaacctctgcctcccgggttcaagtgattcttctgtctcagccttccgaatagctgggattacaggtgcctgtcaccatgcccagctaatttttgtatttttagtagagacagggtttcgtcatgttggtcaggctgatctcgaactcctgacctcaggtgatccgcccaccttggcctcccaaagtgctgggattacaggcgtgagccactgcacccgacctatttttttttttttttttttttttttttttaaaaaaagacagtctcactctatcatccagtccggaatgcagtggcatgatctcagctcactgcaatgtctgcctcctggattccagtgattctcctgcctcagcctctcaagtagctgggattacaggtgcaggccacctggctaatttttgtatgtttagtagagacagggttttgccatgttggccaggccagtctcaaactcttgacctcaagtgatcacccgcctcatcctcccaaagtgctgggattacagccgtgagcctctgcacccagcttttaactccctcttatctgcataacagaagcttagctgcttaagctcctttattagaagagcaaaagtctgaaattattcctgaaacctgctcaatggaagtacctactctattggttgcttcccatatggttgtcactgtaccttcatactgcctcatttgaccctcatattagccctgtacagtagatgggtacactggtttgccaaaggagacctggaatccaaggtggaagtaagcagcaaagccagaaacttcaattctggtctgtctaccttgatagcctgcaccctcccctctaccgttttcttccactatttttgattccttaatgatgaatcatcctctcccttctagttggatttgtttctaatggcttccattacaaggataataatgaaactggtgaaaactttcaggcaaaaggattttctttttatattttttcttattattttttaattattaaccaaattaactcattacagtaaaaaggactgatttttaagccagctgtgatagctctgtaatagtctgtaatctcagcactttgggaggccaaggcgggcagatcgcttgagtccaggaattcgagactagcctgggcagcatggtgaaaccccagctctacaaaaaatagaaaaatcagacgtgggcacatgcctgtagtctcagctacttgggaggctgaggcacgagaatcgcctgaacctgggaggcagaagttgcaatgagctgagatgatgccactgcactccagcctgggtgacagagtgagaccctgtctcaaaaacaaaaaacagaattgattgatgttagttggctttagaagcagcaagtttagggggctacagagctaaaccaggaagcaaaagatgtgcctcattctggcattgtttctgatttaggaataaactgttcagtaagcactgtccctttacttccatggttttcttcattcctcaccacagcacagtaaggtggatattatagtcttcttctagatgaaaaattgaggctcatagtggtcttgctgctgtgtcatagcaatagaatgagagagccttgcttccctgagtccaaatcccatacttttggcattgttatgaggtctggtcacctgatgcttccatgctattttcccatttcttatctggggataatgagtcatattaagtaatttttttttttgagacggagtttcgttctgtcacccaggctggagtgcagtggtgcgatcttggctcactgcaagctctgcctcccgggttcatgccattcttctgcttcagtctcccgagtagctgggactacaggtgcccaccaccacgcccagctaattttttgtatttttagtagaatgaggtttcaccgtgttagccaggatgatctcgatctcctgacctcgtgatccactcgcctcagcctcccaaagtgctgggattacaggcgtgagccattgcacccagccattttttttttttttaagacgacgtctcactctgtcacctatgctggagtgcagtggcgtgatctaggctcattgcaacctctgcctcccaggttcaagcgattttcctgcctcagcctcccaagtagctgggattacaggtgcccaccacctcgcctggctaatttttgtatttttagtagagatgaggttttgccctgttggctaggttggtcttgaactcctgacctcaggtgatccactcacctcagcctcccaaagtgctgggattacaggcaggagccactgcgcccagccaagtaacttttaacagtgtggtataacctttaaatgacaaggtgatgcttttgacttgtcctcaactttgatttgtactgatttgtccctatagttctgggtggggtgggtcaaaacaaagtctcgagctgtaccaggatcaagcagcacagctcagccatgatccttttaccacttttttcttctgtccttgagactctaattaaagcactggatttttaaaaatcacccttgtaaatatgcacacatttgtctatagttgaggaaattgtgccgttgaagtccattcttggacatggagttaagaaaccctggtttgagaaaaagccccagtgagacagcaggaatccttttaccatacaaccctcaactagtttagtgtgctcaagctcaaataaccaatcccatcaagtgaaaagaatggcagcagggagaaggcctggctcactgaggctctcagcattagtttcctctacctcttgtgtctcacaggtgcacatatgtacagcatatcaaagtgttgaatgtcatgagaataaaatatgaaaactactttgctgaatgatagtatgtgatgtgtgctaggacttctagaagccaccctttgctttgctgttcattgggatcatggaatcggacctcagctggttttgcctcagcactttctttcacaaaattatgtgtgactgcctcctccagactgtttcctgctgataggggcagtttaatagccttcttcctgtgtggtatctgcaacaaaatcccaatgaatgtcaccaagaaggaaacaaaggattgcccagcgatgagaaatgtccctggtgccaaaacatcagtttgcccctaacctcttgtgcaatacctttaagtccaggtcatgttgttaccatttgggggtttgcggatttgtttacttgtgcccaagaatggagaaaataacctgtactattgtacaactctggctccatggctcctcacaaatgttccatgtgagatataaacatctttatcctcgacaagtcatgttcattccaagaaaccagtctttgttcttaattggacatttgtttctgcaaacagcttaccatacattcaattccaaagttatcagaaacctacactcttatctcacaaatttagaggtgtggtagatcatctccaaagatggccaccaacagttgctctcatcctctgtgcacgtgctatttccaataaggtctatttttttctacagtgagggctgaacttgtgacttgttttgactaataggatatggaagtgatattttggcagcttccacttttgctcttgaaaataagctgacacgtttccaaacgagaagcttgggctaaattactgaatggtgagagacgatgcataggagaaccaaggtgctctagtcacagcactaaaagcccagacttgtgtctcttgaaggtttcaaccccgccagactcccagctgaacgcaccctcatgagtggcccttgctggtaccacatgacactaaagacatctagctgagtcctgttaacccagagaattatgagaatactgttttaaccacacgttttggaatggtttgatacatggcaatggagaagtgaaacaaggggacttcggaaactaaagggctggaattcagtttgccttgtaggttgattggaagccagatgtgcctagaggaaggctaccaccttgtgcaattccaggggacactgtttatgttccgtgtaaatggcagcctcagttcacctcatttggttatttatcgtgtcttcgctgtcagtcaaattgcttctgagataactggctggccttggaattcttagccacctccttaagcggatcaggaaaactgaagaatatccttctgtatgtatgtatgtatttattgattgatcgatttatgagacagggtctccttctgtcacccaggctggagtgcagtggtacgatcacggctcactgctgcgtcgccttcccaggctccagctatcctcccacctcaacctccagagtagttgagaccacaggcgtgcactaccacgcccggctacctttttgtattttcagtagagacgaggtttcgccgtgttgcccaggctggttcaagcggagctcaagcaatcagcctgcctcggcctcccaaagtgttgggattacaggcatgagccgctgcgcccaaccttcttctgctgtcgagatactgctcatcacctgcctgctccagaattcatgtggcttctcattgctcaatggattaagttcatgtttatcctggctttcaagtctttccgtaagctgactcaacctacatagctttcatcattcccttacacataacctcaacgtgcaacaggattagtctattattccctttcttgtgtttactgagaaagcctccacttcaacgttccatgaagtgtgttccattaaataccaaagtataggcaaaaagttctgtggtcaaataaatttggaaaacacagagtgtttccaaagttagtatcaggccaggcatggtgggaggatcacttgagcccaggagttcgagaccagcctgggcaacatagggagacccaatccctacaaaaaaattagttgggcatggtggtgtgcacccgtagtgccagctactcaggaggctgaggtaggaggatcacctgagcccaggaagtcaaggctgtggtcagctgagatcccaccagtgtgctccagcctgggtgacagagcaagaccctgtctcaaaaaataaaaaaataaagataataccagtatgtttcttgacttgaagatttcccaaaaccttcagtaggctaatgggtgttggagttttcc

SEQ ID NO: 94492 - DNA, 43593 bp, Homo sapiens
ggcaggagaatggcgtgaacccaggaggcggagcttgcagtgagccgagatcgtgccattgcactccatcctgggcgacagagtgagactccgtctcaaaaataaaaagtaaaataataataataataataaaaggtaaacagaaatcttcataatctcaaatactgtaagaaaactttgtcatttcaacagagaagatcaagttaaagttctgcatcatagcactactaataaagctaattttaacaaaaccttataaatgaatccatccaatctcatgcaagataatatttcttttccaagatttcttttctatagatcttttacaacttaaaaaaaatatctggccgggcacggtggctcatgcctgtaatcccagcactttgggaggccgaggcgggtggatcatgaggtgaggagatcgagaccagcctggctaacacggtgaaaccctgtctctactaaaaatataaaaaattagccaagcgtggtggtgggcgcctataatcccagctacttgggaggctgaggcaggagaattgcatgaacccgggaggcggcgcttgcagtgagccaagactgtgccattgcactccagcctgggcgacagaacgagactctgtctcaaaaaaaaaaaagaaaataataataataataatattaaaaggtaaacagaaatcttcataatctcaaatactgtaagaaaactttgtcatttcaacagagaagatcaagttaaagttctgcatcatagcactactaataaagctaattttaacaaaaccttataaatgaatccatccaatctcacgcaagataatatttcttttccaagatttcttttcctttttttttttttttttttttgagacggagtctcgctctttcgcccaggctggagtgtagtggcgctgtcttggctcactgcaagctccgcctcccgggttcacgccattctcctgcctcagcctcccgagtagctgggactacaggcgcccactaccacgcccggctaattttttttgtatttttagtagagacggggtttcaccgtgttagccaggatggtctcgatctcctgacctcgtgatccgccggcctcggcctcccaaagtgctgggattacaggcgtgagccaccgcgcccggccagatttcttttctatagatgttttacaacttaaaaaaaatatctggccgggcaccgtggctcatgcctgtaatcccagcactttgggaggccgaggcgggtggatcatgagggcaggagattgagaccagcctggctaacacggtgaaaccctgtctctactaaaaatataaaaaattagccaggtatggtggcgggcagctgtagttccagctactcgggaggctgaggcaggagcatggcgtgaacccgggaggcagaggtttcagtgagtcgagatcttgccactgcactccagcctgggtgacacagagagatgccatctcaaaaaaaaaaaatctatcagtactttttttcccctacattttttttctttctcattctggaacaaccagttgctatatatattagcacagagtcagttattcctttaagggattttataaattaatttggtgctactatctggaggtagaaaaatatcatgtatatataacatacaaacatacatatgtagttgctctgcaactgaagttggcagaggccagacccagtggctcacgcctgtaatcccagcactttgggaggccaaggcaggcagatcacttaaggccaggagtttgagaccagtcttgccaacatggtgaaacctggtctctacaaaaatacaaaaaaatcagctgggcgtagtggcgtgcgcttatagtcccagctaccttggagactgaggcaggagaatagcttgaacccaggaggtggaggctgcagtgagccgagactgcgccactgcactccagcctgggtgacccagtgagtctctgtcttaaataaatacataaataaataaacaaacaaataaataaagttggcagagtatatagtctgaaggggtttgaggaaaggggattcaggtgactgagaagttccgatgggagaagtaggatccaatagagagaacagagaggcctcacagtgggaagaaaagactgccagcccaggagtcagggagtgaatccccattcagaatgaagagccacaaggaagaccttccaacccaggaagtattatacctttcaaaagaaggctgggaccttaaaaatcaaaatctgtccttaccagctaaaataaaagtttttctacagtcatggctcaggagtttgactcaccagtagatccccaatcagccagtcagaagacaaaggctgcaaagttgcacattgagagtcctgggtcagaggcctgtggcaccacaaccattaaagaaaaaaattattcagcccttgtcaaagcacggtcgggaaggccttattcaggagcattgccactggcatatggaccacaggcaatggggttttgctgcaggggagagattgggctgaactctgaatacagcatggacaagtgtgaactgatagccaaggagcagggcgggggtcagtggatgaaaaattactaagaagaaacataagtgataagggggatactggctaagctgacctaagaggattcttgctgaagacaggctggggtgatcagacatcacctagaggatggtggagggatgaggaatttcatcagtattgagggcgatcagatatcaaaagcagggtggttcttgctaaactggaattctcagacgggcctagaagatttaggagcctgactaaagtttggccaagcaaataatcttttgtcaatacaacaacacgatactttttactgtttgttttttttttttttttttttttttttttttttgagacagagtctcctgctgtctcccaggctggagtgcagtggcgcgatctcagctcactgcaacctctgcatcccgggttcaagcaattctcctgcctcagcctcccaagtagctgcaactacaggtgcgtgccaccatgcccggctaatgtttttgtatttttagtagagacggggtttcaccctgttagccaggatggtctcgatctcctgacctcgtgatctgcctgcctcagcctcccaaagtgctgggattacaggcgtgagccaccgcgccaggccaatacaatagtattaactaatctacagaccttgtttgaattatatcaattgtcccattaatgtcccttttctgagccaggatcccatctatcgtctggattccacactgcattttgttatctcttttaattgaagatggctcctcagtccatctttgacttgaatgatctcgatacttgaaaagcactggctggtaattttgcagaatgcccctaatttggggtttgtctgctcttcattcagattctgccttttgggcaaaaatacccacaagtgaacttgtgttcttctcaggaggtccacagtatgtcctcttactggaactaacttttttcatttctattgaggcagaatttatatacaatgcaatacacatgtttaaatggtacaatttgctaagtttgctggtgaccttgatggcttggttaaaggtggtgtcgcccaagttttcttccactctaaaactactattttccctaggcaattagtatcctgggggagaaactttgcaacactgaaaacaaaacaaaacctgtttgtcatgtttttgcccactatttttttttttttttgagatggagtctcactctgtcacccaggctggagtgcagtggcgtgatcccggctcaccacaacctctgcctcccaggttcaagtgattctcctgccttggcctcccgagtagctgggactacaggcacgtgccaccatgcccagctaattttttttgtagttttagtagagacgaggtttcaccatcttggccaggatggtcttgatctcttgacctcgtgacccacccgcctcggcctcccaaagtgctgggattacaggcgtaagccactgtgcctggcctattttttttgtagggggttgggggccggggaccgagtctcgttctgttgcccatgctggagtgcagtggctggatcttggctcactgcaactcctgcctcccaggttcaagcaattctccagcttcagcctccgtagctgggacaacaggcacctgccaccaagccctgctatttttttttgtatttatagtagagacagggtttcaccatgttggtcaggctggtctcgaactcctaacctcaagtgatccgcccgcctcggcctcccaaagtgctgggattacacgcatgagccactgtgcctggccttgctcactattttttctggagacggtctcgttctgtcacccaggttggagtgcagtggcccgatctcagatcattgcaacctccacctcccgggttcaagcgattctcctgcctcagcctcccgagtagctgggattacaggtgcctgctaccacgcctggctactttttgtattttcagtagagataaggtttcgccacgttgcccaagctggtgtggaactcttgagctcaggtgatccgcctgcttcggcctcccaaagtactggggttacaggcgtgagccacagggcccggcccactatttttatcactcaagattttcgtctacagcagctattattggggtggctacccagtggaaaatttttctatttccactattccttccacatttattgacaggaaagctagtctaaggaagagctgtaccctcacttactcagaccctcgttttccttttttttttttttttttttgagacggagtctcactctgccgcccaggctagagtgaaagtggtgctatctcggatcactgcagcctggaactcctggactcaggtgatccttccacctcagcctcccgagtagctcggaccacaggcgcccgccaccacgcggctaattaaaaataattttgggcccggcgcggtggctcatgcctgtaatcccagcactttgggaggccgaggcgggcagatcaattgaggccaggagtttgataccagcctggccaacatggtgaaaccccgtctctaccaaaaatataaaaattagccgggcgtggtggtgggcgcctgtaatcccagttactcgggtgggtgagccaggagaatcgcttgaatccgggaggcaaaggttgcagtgagctgagatcgcgccactgcaccccagcctgggagacaaagcgagacaccgcctcaaaaaaaaaaaaaaaaagaaagaaaatttgtagatactgggctctcactatgttagccaggctggtctcgaactcctgggctcaagtaatcctcctgactcgacctcccaaaactctgggattacaggcgcaagccaccgtgcccggccgaaccaccgtgcccggccgaaccctccctgttttggaaatcctgtattagcaaaggggacagcgccagacagttgagcacacgcgttctttataaatgatgatgtctgatacagtgatgcttttaacagggttgtgtaacgcctgtgtgtgcacggtctcttctgcagtgtccaccgaaggtggcccgtctgcgtgtccgctcccggcgtactccgcgctccctgttcccggcattccccgcgctccccgagcttcccgcgctcccctgctcccggcattcccggtgcttcccgttcccggcgctcctcgcggccgccgccctcagtccagcgagccccgcctgggcagcgactgttagcgcgaccgcggcctgggcgcctggtccctcccgcgcggccgcgctattgggccgcgcgcggcggacacacgcgctacgcgccgccgattggcggcctccgcagcgcgctctgcggctcccccaatgcggggcggccgcgcgcggggattggccgcacgccgcgaaggcccgccctccgctcgcccggcgcggcaggcgggtgccggcgaccggagagcctggacaggctttccagatggctgcggcggtcggtcggtgaggctttcccggctgtggtttggctgcgggcggcttgggcagcccgcgggcgcctcaggtaggtgcggggcgcgaggggcgcccgcgggcggttgggcgggcgccgcggcctgcgcgagggcgcgcccttccctcccgcctccctccgggaccgaggccgcgggcggggcgggggcgcggagcccggcctttgtgaggcaacatggccgcgggcggtggagagcgcggggtggggacgcctccggggctggggggcgggccccgggcccaggcgttgccgactctcgtcgctgtccgcccgggtaaagaggctcctctcccggagggcccgaagcctagcatcgccttcaggcgggaaaggtgtggacagggccagtgctcgcctgggaccctgccggctttaacacagtttgggaaatccaagaagtcgcctaagtctttttgtccacagaatgctcacgggttgagtgtcacgtagataattgggatacggttttattgtaacaatgagcatggcggaaataaatggaaggtggcaacctgttgacagtgatgcctstctggtgtcaaccgatggacttgggtttcttgtggcaggagtctgatttgcctttttgcatgcttgcatgtaccttgttcctgcacggcagtcctgtctttggctgtcgactgttcgaggccaaccaccaggcgaggatccactgtttmctggccagactagactcccagctgtgggagtggcccaaaccctgctgcaggccttcactcacaaaagggagtgaatggccagcccggggtacccagtgttgcctctaagtgcgggatatgaggcctgttggaggatgacaaaaggaacggatgaggtcatactgccgctgggttgggcgggaggctgcagcgggagagacttgaccaaaaggcagcctccatggcgctggcactggtgctggcccgtcacagccagtgcctctgttagccaacacagcaagtgggctaggaggaagggtgctgtccaagtgtacgggttttctccccgtgccaagggtccaggggagcttgccgkgagcccgttcctgtccgatagtcctgttggcaaggcagggtttgcatgcggtgtttggtcagctggagcagtggggaggcctacgggcagagagctcccctttgagccctttgcggccaggcgctgtgtggagcacttcccaggggttgttttgtagtctcaccgtgaccttggggtaggaaatgtgcttctggctggcttgcccagtcttagactctcttgttgtagccctctcctttgtgatgtcacccagcctcctgrctttaatgccagctttccttgacatcttcacagctccagccctggcctctcttctgatttccagcctggtgtttctggccacctcttccatatctccatgtgttactttggcgccaagtagccatatccaaaccaaactcaaatcttcacccatgccaaaacattccttggcctatctaaagtccctttgattcctctctttcttacaccttcatgcagtcctaaggaggccccgtcagctcacctatttctaagcacagaccatttctcaccaccttcaagttaacatcctggcccagcctacctggtgagcctctaattctctttactgtcaccttaggtcctcactccccatccaccatctatagtttttctggacacagagtgattcttctttctttctttttttttttttttgtttttttgagacagaatctcgctctgtcgcccagactggagtgcagtggcgtgatctcagctcactgcaacttctgcctcccgggttcaagcgattctcctgcctcagcctcccaagtagctgggactgcaggcgtccaccaccaccacgcccggctgatttttgtatttttagtagagacggggtttcaccatgttggccaggctggtctcgaactcctggcctcaaatgatctgcctgcctcagccttccagagcgctgggattacaggcgtgagccactgtgcctggccacagagtgattctttttatttttttgagacagagtctcgctttgttgctcaggctggagtgcagtggtgcgatctcccgctcactgtaagcttcgcctcctgggttcaagccattctcctgcctcagcctcccgagtagctgggactataggcgcccaccaccacactcggctaattttttgtatttttaatagagacggggtttcaatgtgttagccagggtggtgtcgatctcctgaccttgtggtccgcctgcctcagcctcccaaagtgctgggattacagtcgtgcaccaccgcgcccggcccagagtggttcttttaaaccataagatggtataaaacagaggcggtgtagatgcaagccagcttgcctgcttgtaaagcagctccatcacttcctggctgtatgaccttgagcatgtgggtgaacctttcttccataatgctatgtgagacctgggtgagttaaratgcttaaagtgcttagaacagggcctggctgaggtttggttgccactgctatcctggaatcagctgatgccactgtgtgggccttcctatccggtggcccatctctctcactaagagccaaagtcctggcagcagcctgggaggaccagccctgatccatctgccctcatggacttggcccactgtcacgtcccctcagcacactgccccagctggccacaccacattcctgaccccagccctctgcttttcctctcagtgtcacctggaacatcccctcctcccagccctgtaacccacctggctcactcctgccttcacgtggatgcaggccatgaggccttcttggatcccccttcctaaaactgcctccccttcttcaggcgctttccttgttttgtttttgcttgaatacttcttggcatgtgacagggtgcatgcttttcttagttgttagcggtccatctcccccactaaaatgtgagctctgtagggcagggttttgtccaccttgtgtctgtagcatctaggatggtgtgtgtgtgtgtgatgaatggagaaagcttatagaggggaggaaggaacttgcccaggactgcccaccactgaggtctggggctgggcaggtttcctgctttcctaaggagctcactcacttgtaaggcaccaggctttcctgctgtgcatttcttcagtgccgccgcttggccccattagcacctttgcttggaacgtctactctagctgcttcttcgccttctgtggtagcaggcttccccattccgtcccactgttggtctctaatcccctgctccttgtggcttcttcatgtagctttttgtgtcccagaatcatggattgactcaccagggtctctatgggactgccaggttctgaggtgtgtggccctggtcttccttgtaatctgtggcactgggcgcattgacccctcggtctgttttctctaatggtctttcttggttgccaggagactgacctcaccccrcttagtgttcctcatgcctgcctggttgctgcccacagcctcttgagcgtcttcagcactttatagtcagttgttagctctgtgctgtgtttcctggatcctcagcacctttgatggacacatctttgggaacatacggtgtgaaattcccattagattcagaaatgttaggacatcttagaatccaggaaatggggtgacagtgcagtggtcattgacctgccagtgtgtccaggccctgtgaccttgtctcttgtccatatagtgcgttcctcggagtagatggccagkggatagttgttaaatgtattgattaaacctaaactagtctctggttttcatgttgtgtccccttcgaagtacatccaccatgccytgtcccttgttaaatgtgtgatgtctgcatctcctgttctttccgggaatcttgggaggatgttaggtcatgcagtgcggtttgcatgtgtgcatctttactggtatgcacgcatgtgcatgcatgcgtgttcctgtgcacgttgtgggagtgtgcatgtgygtgtgtctgcatgtgttccttctgctctgatgcagggttttctggctgccccctcagacccatcttccctgcttcatgttgtccctttcttcatgcttcctctgtagtaaggcttcctagagttgcatccttaaccctcatctctgggtggccttcctcctgtgggtttggcgactacctcctcagtgcgtcctggccttccgtatctggaccagtcatggctccagagttgtggcctcggcaccttcagagcctgcctggaggtcccctctgttctcctcgccaggctcctgcctgcatgctggaatttgggtgtccttccttgtctttagttccctcttttctctgctatccacctccgttgggtcaacaagtgcggtcagttctgtgacactgttcttggcccattgccagggcctctttcacacctttgtcctctggcctggaggactgtccccgtgccttggatgcagttgcttctgcctggcacagctgtgggtctcccctctcaagtagsaacctacttgtggcatgagagtcgcttcaccttcagtggctccttattgtccccagggcggaacgggctgcaggtggcacccaggcctctctgtgcctcggctccagctgtctcttgtggctccccaccccaaatcctggcaggtcccttccccacagccacccacccctctcctccatcgggaacagaactatgctgccacctctggtgacctcagcacgctgcatcactgtcccygtccacgtgctaccctgtgggcccaggagagccctggggtccctgggtagcagagcgcctggccatgcctctgaggcccctagtgccgcagagttgagctgagggtctcgcgctcgccctctgactgacccagcccttgcaggtgagtggattgctgtgctctggtggcctgagggaggccacgygccttctgtgtgttccagaaagggtgcctcccactgcatgcttgcttatctgagttagaagaatgctgtggtggagtttagtgtaaatttttaaaatattttttgagccttatgattatatagtttttgtgtttctgaagtaggaattaaagtgggcattaacaaaatatttaactttggacttaagttataattcaggttctgaagaataaaagtaaggttagtttgttttratgcctaaaaagtcctcttagggaatattattttgaagccctttactatgctgttaatagtgcttggcttttaacytggtaccagggaattggaaggtttctgtcattttgtgacgatatttttaaatttctttgcaggtagaagaagaaaggtgccactccggcatgaagacagactcgcttagtcgccagtcacttaagctgagtgcattgtgatttccaataattgaggcagtggttctaaaagctgtctacattaatgaaaagagcaatgtggccagcttgactaagccgccagcgcacagcgcggcaggacgcgcccgggtctcagcggacttgtgcatgttagctgtgtagatttatgtgagggcttgtaaaactctggtcttgtaaactagtcttaagcgcttttaatatggagacagatkagagcccctctccgctccygtgtgggcccgcaggagaagcggtgatggagagccgagctcgccccttccaagcgctgccccgtgagcagtctccaccacctcccctgcaaacgtccagtggtgcagaggtaatggacgttggctctggtggtgatggacagtccgaactccctgctgaggaccccttcaacttctacggagcttctcttctctccaaaggatccttctctaagggccgcctcctcatagacccgaactgtagtggccacagcccgcgcaccgcccggcacgcacctgcggtccggaagttctcccctgaccttaagttgcttaaggatgtaaagattagcgtgagctttaccgagagctgcaggagtaaggacaggaaggtgctgtacacaggagcagagcgcgacgtgcgggcggagtgcggtctgctccttagccctgtcagtggggacgtgcatgcttgtccctttggcgggagtgttggtgacggggtaggcrtagggggtgagagtgctgataagaaggatgaggagaatgagctggatcaggaaaagagagtggagtatgcagtgctcgatgagttagaagattttactgacaatttggagctagatgaagaaggagcaggcgggttcacggctaaagcratcgttcagagagacagagtggatgaagaggccttgaatttcccctacgaggtatgttggcagcccctcctctagagggctcttagcaaaacccaaagagagatttgggaattgcagcatcttttgaaagcagggaaattaaaaaaaaaaaaaacaaaaaccaaaatcccctctgaggtggaataatgttaatgtggagaagagaaagatgtaaggagtccagatttttaaagtttcctaatgaaaagtttggcccatgggtaggccctgcatccctgatctagcgcgtggggcagcaggtgctgctgagttacgctccttggcagtgtgtgcccctggaccaggtgtgttggtgtcagctggtagcttcatcctgtttgtttttcagatgatcatgcaccctaagggcacatctaggcyccctgagagcacctcctttctgtgtctgttctcaggaatgctgttgagctctcctgttgcaggagcatgagcgccaggggctctggtgtctgaacagcgtgttttgcaggatgactttgacaaygatgtggatgctctgctggaagaaggcctttgtgcccccaaaaagaggcgaacagaggaaaaatatggcggagacagcgaccatccgtccgatggagagacaagtgtgcagccgatgatgaccaagattaaaacagtgctcaaaagtacgtgtgtgggtcagaagcagtgggtgttccagggcagtggaggggtggttgcttccttagcagaaatgctttgagagagctctggtgccaggtagtgggctgggtggaggcatgtttgaggacaggacagaaatatctgaggagggaaacacaggatgggaggacgtcctgatgcatgacccagatgcggatcctggtgtrtgctatggaaaccacagagcagcaggcactgtgcagaggaatgggaggggacttctgagggggtcaggaggggatgttggtatatgccaggagccagcatgaccatcagctggagggtgtggagaccaagggcaaggtgggtacacagtgagatggcaggtgatagttgtgatccaggttctagtcctggaccaagtgtcacaggaagccaccagaagcaagtggtgttacctgatttttgtttaacaacatggcttctgggccacagcatggtgtgtgcacttcagctgggcagggtggaagtgccctggtcgacgtggcacttcctcaactttgagttgagggtagtggggagagcacttgagaggcgcccagagttgcactgtgaggctctgtcatcgatgtggtgcaggtgttgggggagtcggagttggtggcttggaggcacctatgagggtcctggtggagatgtggggctcggtagagggactgaagagatgcacggggactcaggctcacaggtgagaccccaggctgagggctggggtgcacaaggtggcagggtgcgactgggagcaaagcaaggggcgggtggcacatggccatcctccttgggccattgaggggacaagttagctatgccaggtgccacatgttgctgcctatgtcgtgttggtagcagttaagcaggagggcttttggtctagacggttgcaggcagggtaaacctggggcttcagcttctggggctgggggcaggagtcttgacctcggggcctctaggaggctggtttggtgctgcattttcaacaggctcattcagaaggtaaacccacattcgtcctgcacagctcactggtcagcagccattctggcctggatgcctggatgttcacagacggacagctgcatgtgacccccacctcaggtggctgggccaactttgtgaccactcactgtcacagaggagcagccccagcggacccgtggcccgtctcttgcttggctccgtattccctttgcttcttttcctgacttaacctaaagctggcaggaggcagctccatcttggcctgactctgtggggagagagcccacgcagtgtgcatgcacccctgacctttaacactccctccctgaatcatcacctgatggtggcctgggtacaggtgtcaggtccagggtcagggccacttggtgggtacctagccctgagagtcactggccctttttccccttatgtatattttttaaggtttcatttgctttcttctgttttttaattttttttttgaggcggggtcttgctgttacccaggttggagtagctcactacagcctcagcctcccaggctcaagtgatcctcccacctcagcttcccaagtagccaggactataggtgtatgccaccatgcctggataattttaaaaagttttttgtagagtcagggtcttgctgtgttgcctaggctggtctttctaagtttttaacttgttcccaatacctgtgagaaaattaagttttagttacatctttgccttacgctcttcccagcagtcaggcctggtggcaggtgtcaagttgataagtcgtaaacctcttcctcacaactgcctataaagcaaagaaggggttgggagtagtgtattaaaccaacttagaaacggaatcatttgaagcagtgttttgtatgctgctgagagtgcagctcagttacaataaagacttgtcacctggtcactgggagcagtggctgacagccatgcagtttattagcaaagctcatccagccccaaggcgcctctggccacaaccagacaggcagcaaaggagtccagtgtccacagtgcttaccagatgtggaggcaggagctgaggctgggacttatatcttgcacagacctgttctgtgctccttcatgtgctggtttgacacgtgtaaattcccacctcaggccacatgctatctgtcctaggcctggaggcatagcagtgagcaaggcagagaggaatttcgattatctgtgaagacccagttaaacacatgctagtacccaacaatttcttgtgcaggaggtgctgtggcaacaattccaagtgtttttacagtgattataggatgttcttgtcttcctgtgcaggtcgtggccgcccacctacagagccgctgcccgacgggtggatcatgacattccataactctggagtcccggtgtacctacacagagagtctcgggtggtcacctggtccaggccatacttcttgggaacgggaagcatacgggtaggggaggcatcagtcgtgactttaggcttgtaagttctcagaccaaaacgtgcacatccacacacatggcaccgcagccaagcagaggccggtgaaaggcatcagagtttcagactctygggttgtccttgtaatccatattgcaatttcactatccacagaaacacgaccctcctctgagtagcatcccttgtctgcattataagaaaatgaaggacaacgaggaacgggagcaaagcagtgacctcacccctagtggggatgtgtcccccgtcaagcccctgagccgatctgcagagctggagtttcccctggatgagcctgactctatgggtgctgacccggggcccccggacgagaaagacccactaggggctgaggcmgcccctggggccctggggcaggtgaaggccaaagtcgaggtgtgcaaagatgaatccgttggtgagtttttgaaggactcttcccttcttgcctcctgggacccatgagctttgtttttctaatgaaggccataattgttcayagttcctagttgtacttgtgagcaaggggctgtgcacctccactgttggtgtggctgaaaggcttgtcttcctgtccttgcaagaacctgcctgggtgcagcaccctaggctcctgtctgtgggctctgtggtgtctgcatggctgaggctgctggggagatggctgctggcactggcagtgggccgttttctctctggttgtttgtatgatctttccctaagtcttgctttttcagtaggatgtgctcatgtggcattgttttgatttgtcttgatgagctcagtgagcctctttaatccatgactcagtgttgggaaactgtcaccattctgtggatagttccctcttcaatcctgcaattgcttgctggatgtgtactggtgtttcccattctctcttccatgtcttttagcctagtcccgccatttaagtcttagttctctcttcaggtgtggcaggtctctgtgaacccacctgctggattactttcaaagagcactttccattttctaggtttctatttgtctgtacatcactacccagcctgtctcataactccgtggagtgtggggtgccctagaagagcctgtgatgggggctgttgctgaggatggggaagtggcccgggaggaaatgtgacaaatgcgaggccctgtgcagggagctgcctgggtgtgttgctgactacagaggtggccaggatggccagaaggaaaagagtgaggtggtcagagaggtggcgggcgcatggagcccgggtgctgctggcattcgggcacctgttttgatacagggaggaagtcccgaaggccatctgacttttttaagctgtcttttttccttttcatttttgtattcttcctgccccaaataaagtaaaagaacatctcagaaattcatccagaagggacctgccagaataatctgagctggtgtagggaggccttcattctttgcttccctcccctttgaaagggacggggaaaggaaatagtgtcatgtggcctgggcctgccccatgcactgggctgtgagaacctgactcctatgttggaagttaagtaatttgtttctctggtaaatctgggacagatctcgaggaatttcgaagctacctggagaagcgttttgactttgagcaagttactgtgaaaaaattcaggacttgggctgagcggcggcaattcaatcgggaaatgaagcggaagcaggcggagtccgagaggcccatcttgccagccaatcagaagctcattactttatcagtgcaagatgcacccacaaagaaaggtataagcctctgcattttaacatcagcagactggttatgctgttatttctaatgtgatgtgttgagggcatgttttatgagttgcatttcgttcaaagwttatgtttatcccatgaatgcaggggtctgccacattcacggtcgtgagcccctagttactgacatggtaacaggaagctgtgtgctagcttgtggcactgcttcacacttgctgagatggttctttttgtcacagagtttgttattaaccccaacgggaaatccgaggtctgcatcctgcacgagtacatgcagcgtgtcctcaaggtccgccctgtctataatttctttgaatgtggtaagtctaaccttccccatttcagtcctaaagaatcacaaggtgtaactttggtcagggctggggaggcaggcgctgaccgctagccctactctactggaacgggaggraagggaagggtagagagcagcgtgctgcagatgggtggcttgtttcctggagccgcgccccatctgagtgggtggctctgcttttcccttccagtctgtcccctctccccaccttcctcttgtcctgccccatctgccttgctggtttctgatcctgcgttgtcatggacagccttattgcgagcaaggcctccccactgtgcactgggtcctttccctggtctcctggtgcccctgggtgtctgaagggttcttgggcatgcatttcccaccagctctgtcttccttgggtgccctcatcacacctttgtgaagaccagtctgtcttccccttggaagctggagcctgggggtcactcatcctttgaggtggtgtttctttggcaagccacatcttgtgctttcccattccggcagtcctgtgtccgtctttcgtagaccttggtccctgtcgtaggaggctctgcccccagcctcctgctgcccctctggctcaccatctcccacgtgcctcatttccctccactttcccagctgtgccctttgctgctgcttgtctgctgcccgtctccagtcccagggagccccaggtctctgcagtcaagcacaggcccactctctgcagggacagcccctgactgcgccttgtctgtcggtgtgggcagactgtgcacacgcttttgatgtcttgactcgtatgttttaaaacaagtaattttaattttaagagaacccaagtgagccttttggtgcctcggtgaccattgatggtgtgacttacggatctggaactgcaagcagcaaaaaacttgcgaagaataaagctggtaaygtgcttgcttgrgtgtcaaagatacgtgctgcctgctgtgtctgcctcgctgcttggttagggaggggctgagcagtggtgacaagtgggggatgtgggtggggcatgtttattttatttatgtaatcatctactttgatttttaaaattacatgctcattggaaaagactcaaatagagcaaaatgtgagacttaaaagtagaaggcctcggccgggcgtggtgtctcatgcctgtaatcccagcactttgggaggctgaagtgggcagatcacgaggtcaggagatcgagaccatcctggctaacacggtgaaaccctctctctactaaaaatacaaaaaattagccgggtgtggtggcgggcacctgtagtcycagctactcgggaggctgaggcaggagaatggcgtgaacaagcgaggcagagcttgcagtgagctgagatcgtgccactgcactccagcctgggcgacagtgcaagactctgtctraaaaaaaaaaagtagaaggcctctctactgagtgacagctgggccagtatgtccctccctagtcctggccctgcacatattcaggggtgtgcctagagccaactgggctgtgctgggcacatgctgtagtgcttgtttgtttttaaactgagcagcatgtgggcatgccaggagggaggagaagcgggccagcatgctgttggcatcctcccccagtggtgctggctcttaccggcactatttcctgagtcctcccactccatgtttgggcctagccacacagaacacctggcacagcgcagctctgggaaggctgtgtgtcctggcgaagacccactgcccttttggaccatgcccttgccgtttgcattcatgccctgcattcgtggtagttgacattctttcacaaaaagccatttgcctcagcgtccagggttagttggcttcttgtagggtggtgttgggtgtaccccaggccctcgcacccacaggttgattctcgaggtatctgtcattgccgtgtgttttccagaaggcctgctgcccatcttagattctgcctaagagacttttgcagctcaacaaagggggtgtggtggaggttttgacagataacttgcagtggggccttttgtgggggtggagatgccttgggcgtggctgtgtgctcttccctctgcgggatcacccgctttcctccctatgtgctggaacccacttcccttgcccagactcttggctgccctatagacagcttggctccatgtcttgccagcactgatagctctgtggggtctatggagccatcagcccttggctatggcaactccgaccccagtgggcatatccgtgccctgccctctagcagctccctctagcgtctctcagacctggctgcatctctccacccacgccagccactgcygctgccacctggtctaggtacctgcagtagcctgctctcaggcctccctgcatggtccagggcccgcaaagctgttttctcacgtgccaccgaagtggttccctaacatacagctccgagctcctccctgcctgctcccaggaccccagggtgagagcgcacacacccagtgtggcccgtgaggctttctggtagcctgccacacgtctgggcttttccttytgtcctctcctgaccctgtcactgaagtgctgtctctcctcagggccctcgctcagcctctgagctgtggggatgggaggcagcagtgcacagttcactctgcagggtggtgagaagagggcagtgcccaagcctcaccctcgggctcttttttttcatagcccgagctacactggaaatcctcatccctgactttgttaaacagacctctgaagagargcccaaagacagtgaagaactcgaggtgagtgttgtggtcctgccctgctgggagctgtgtgtgcagtgcggctaccctgccctgttagtgtgagctgggggtgtccgtgggctgtgctcatgccttccatgccctgtaggttagtctcatccagcctccaggttcttctgtttgtatttcataaagaggaaacttgcctgtctttgtataggcagggaaaaaatgtcctttttgttagagatttttgtcctcttttgcagcattgagtgtgcaccrtaaatgtcgggtacacataggtttgtgatgggaatgaatctttgaggcagtctacaagatttagattgttcttttttttgagacaaagtcttgctctgtcacccaggcagtgacagagtttgatcttgacccactgcaactttcacctcccggattcaagtgattctcccacctcagcttcctgagtagctgggattacaggtgtgtgccaccatttctggctaatttttgtatttttagtagagatggggtttcaccatgttggccaggctggtctcgaactcctgacctygggtgatccactcgcttccgcctcctaaagtgctgggattacaggcattagccactgcgcccggccctagattgttctttatatacttgacccttgagyaacgtggaagttaggggcaccagcctctcacgtggtcgaaaattcacgcatcactttcagtcctcccaaaccttaactacttactggtaacctactcttgaccagaagccgtaccagtaacaaacaattgattaatacatattttgttatgtacatattactacatctgtccccaacctagttttggcaccagagatcagtttcagggaagacaatttttccacagacggtgttggggggcggggatggtttcaggatgactcaagcacatcacatttattgtgcactttttatttctrttatcactacactgtaatatgtaatgtaatcactatacaactcaccataatataaaaccagtgggagccctgagcttgttttcttgcaactagatggtyccctctgatgacgatgggagacagtgacagatcatcaggcattagatttgcataaggagtacacaacctagatcccttgaatgcactgttcacaatagggttcacactcctatgagaatctaatgctactgctgatctgacaggagacagagctcaggtgtaaaatgagtgatggggagcagctgtaaatacagattaagcttcacttgctcacttactccccctgcccccaccactcatgtcctgctatgcagcccggttcctaacaggccatggattggtaccagtccatggcctgggggttggggacccctgatatatactgtattcttacattaaagtaagttacaaaaagaatgttattaagaaaatcataaggaagagaaaatttatttactgttcttgaaatggaaacatcatcatgaaggtcttcatcctccacatcttcatgtcgaatagctgaggaggagggggaagaagaagagttggccttggtatctcaggggtggcagaggcagaagaaaatttttgtataagtgggcccatggagttcaaatccatgttgttcaagggtcagccatgtgaagaaccatttaaaactagctgtaaacctttttgggtaaatggttatttgtagcaagggcttgtggaattttgaagggtgcattcttatttatataatagctttattgagatagtttacatactataaatttggccttttaaactatataagtggatttttatatattcagagttgtataaccatcataactacctaattttagagtatctcaacacccccaaaagaaactccatacccattagcattccctcttagttctctccaaccaccaaaagccactaatctgctttctgtctctatatatctgccaactctggacatttcatattagcggaatcatacaatatgtggtcttttgtgactggcttccttcacttagtgtgctatgtcagctgtaggtttttatcagaataaggaaatttccttttgttcctggtttgctgagagtttttgtaggaatgatgttagattttgtcaaatgtttttctgcttctattcagatgatcatgtttttttttgtcttttattttagtaatatagtgtattatattggtttttgaatggtgagccaaccttgcattcctgggatatatcccacttggtcatgacatataatgatttttttaatatgttgctggattcattttgctggtattttgttaaggatttttgcatttgtagttataagcaatattgatctgtagttttcttgtgatatctttgtccagtgtaacarcaggtacaggtatcaggataatactggcctcataaaatggttggaacatgttccattttcttctgttgtgtggaatagtttgtgaaggattggtgttcattttttaaatgttttgtagactgcgttcagtgaaaccttctggtcccaggcttttctttgtccagagctacttaattgctaattcaatcttacatgttataggtctattgagattatctatttcttcttgagccagtgttgatagtttgtgtcttttttggaatttttttcccatttgatgtagattatctaattgattagcatatatttgttcctagtatccccatatgacccttttttatttctatatggttgtgatggtcccttgctgtcattcctgatttcagtaatttgaggctttcttctttttcttgatcagtaaattgttacacttgatgatacatcacaggtctctgaggctctgttgtttcttctctgtacttttttctttctgttcctcagtgtggattatttcaattgccctgtcttcaagtttgctcctttatcttctgttggctcacattctgctggtaaacccctctagtgactgtttcataatttctgtcttttttaaaaaaattctttattgggtaatgcattgtttttatactttaattcttttttttttttttttaattatatatatagggtcaggcatggtggctcacacctgtaatcccagcactttgggaggccaaggcgggcagatcacaaggtcaagagatcgagaccatcctggccaacatggtgaaaccccgtctctactaaaaatacaaaaattagctgggtgtggtggtgggcacctgtaattgcagctacccgggaggctgaggcagaagaaccacttgaacccaggaggtggaggttgcagtgagctgatactgcgccactgtgctccagcctggtgacagagcgagactcctgtctcaaaaaaaaaaaaaggaaaaagaaaaaawawatatatatatatggggtagagatggrgtttcaccatattgctcaggctggtctcgaactcctaggctcaagcaatctgcccacctcagcctcccaaattgttgagatgacagacgtgccactgtgctggcattatacttcagttctttagacatggtttcttagtcctttgagtatgttttctgtaggtgatgtaaaatctgtttctggtaagtccagttctcagagagcgtgtatattaaactgcctttcccttcatgtatgggctgtctctactttcctatttctttgcatatctcagaattttttgttattgtcaagaattggacatttaaaatatatggcaactctggaaatcacattacctcacctcccttaagtttatagtttttgtcatatgtccttgctctctatttgtgactgtatcagtttgctagggatactgtaacaaagtgtcacagactgggaggcttaaatgacagagatgtatagtctcaaagttctggaagccagaagtccaaaatgaaggtgtcagaaggctaagagaaggcctttctccgtgggtggaggatagcgatctccatgtccatgcctttctctctgtgtgcatgctggtctccacattgcccatttgatagagacacctgtctcactggattaggccctaccctaatgacctcattgtaatgtgatgacctctgtaaagaccttgtctccaaatactgttgcattctgagggacttcaacatgtaaatttgggggtgacagtttacctcataatagtgactttcctagattgattctgtgaagtgtgtattctttatgatttgtggccactgaatacacgggccctttagctgagtggtctcctgatgcttggacagggattttcktaaattccctgagccagtaagtctcccggcctgtgatgagagctgtgggtctgtggggctcacctggtgtgctccggtggctgccaactgtcttagcctttgtgtgccacctgcacagagtctccaggtcagtcagctgggaggttttcctgggcctgtgcgcagycatctccagacatacgctagagcctttcagagccccatggacatctccagcttttccttcttgggttcttggccagcctcttgtttgcccaactagtgccccagcctctggcagctgcagggtgaaacagttgccactggttccttttgacaaaagccctcaggaactgggctgttttcactgagtgagatcaaataaagacaaatcctgccatgaggcttttccagagggtggccaggtaaacccaacagtgacagttctctgggcctggggccttgaggacccgttctccattgagtggctaccactgagctggggagaagggctgggaatggggcgagttaagatgccagcaactccttgttcttagcaagactcgttgtctttcttgaatcaacactcctcagattgttgaaagcctttctttagtttccagggttctgaaagaattaattctgaccatttttgctagtgttcttgttgctttaatggaggagagcagattttggaggtccttattcggccattccagaactactttaggatgggttttgtaaagttttctcatctttgtggactggtgctgttataaaatatggttaagtgtctatggtagtactaacttgctcttaagtttcttgaactcctggcttcaagcagtcctcctgcctcagcctcccaggatgatgggattacaggcgtgagccaccacacctagtctcttgctctcaagtttctacatgttttctgtgctttatgtaactgcttcatcgtggacaggctacagacagattgcagaccacatgtggatcaagcacagtctccaagtactagctgttccaggaagagtcacatttgtccctttttttttgagatggagtctcgctctgttgccaggctggagtgcagtggttcgatctctgcttactgcaacctccgcctcctgggttcaagcgattcttctgcctcagcctcctgagtagttgggactacaggtgcacgccaccacgcccggctaatttttgtatttttagtagagatggggtttcaccgtgttggccaggatggtctctatctcttgacctcgtgatccgtccgtcttggcctcccaaagtgctgggattataggcgtgagccactgcacctggccacatttgattttatttctgagtgacccaaccgtgggaaatatggctcccagggaggcttccaaggccctctggggaagtgcttgcgtagaccctggcccaccaaaactcttagtatgggttgctgcagacgatggtgcctgagttgtgtaggtctcacgctgccttcctgtctgagtaaaagccctgcctgttctttgctatggggtggtggaaatgtccatgaaccactgtggtttctggtgccaggagagggcccagcggggagtcaggttctcagcctccactctggggttcttctgtgaagtggagaggctttgcagaaaccacattgcaaagtagtctgagaaagaagaggtttccccaggtggagaaggacatgggggtggggcatgtggtggcttccgctgtagactcccctgcctggggctttttccacacccctactccgatcctcccacactgcagcctgtctggagctagcgtcatatctccccaggtaaggagctcagtttcgtgggactgcccccacttcctgtgccagccgcaaatgggggcccctgccacccggcacaggacccctcctcgtgcttggaaatttgctaggactcaggaactcaggaaaaattttacttatgaaacttatttttcatgaagggctgaaagttcctcccctctactgacacatttgatttctccggggagcccaccctggccacctcctcagcataagctctgtggtggggtcgttttgaatcacaaaagacaaacctagcastcaggaaatcctcagggttttaagaactctgttctgggaacctgagagaagaccgtgtgtttttatgatgccatgccttggtttagggtgccttttgtatgtgcccctcctgagaagctctttgaccctcttatttgtatatatgtcatctgtgggctgggcgcggtggctcacgcctgtaatcccagcactttgggaggccgaggcgggcagattacgaggtaaggacatcgagaccatcctggctaacacggtgaaaccccgtctctactaaaaacatacaaaaaattagccgggcatggtggtgggcgcctgcagtcccagctactcgggaggctgaggcaggagaatggcgtgaacccaggaggcggagcttgcagcgagctgagattgcgccactgcactccagcctgggcgacggagcgagaatatgtctcaaaaaaaaaaaaatgtatatatgtcatctgtgatgtccccatttaaaaatctgtcagaggggaaagtagcttttccctccgttgtagggtggtgggggtgtttagacaggggtggccatctcctgttcctgggaagtttctatttgctggtcctccctagcgaggctctcaggttgtgtccccgccccctgctcctcccagctgcctgtgcagaggtgccaacacctgtccttggactgtcccctggacagcctggggcgtggggtagtatcccctccttgtgtggactccggaggtggggttgacatgtcaggaggggcgggttgatgcctgtgaggtgtggtggccacgcgtgtatgctacttgattaaaaagggaaaaaaggaacaactggcatcatttccttttcacaaagcttgtggtgatctcttggtattttgttgctagctgtgggttggtggttcatggctattaaatttaggtattagtgaccaagtgttttcttttttttttttcatcttattttaaaatttacatagagttaaattcactttttggtacagtactgtgagttttgacaaatacacagtcatgtaaccaacactgcaatcaagatgcagaacatttctgtacattccaacattcttcttygttggtcaaactctcccacctgtatcctctggtgggcactgaactgcccctgtagttttgccagatcctgaatgtcctcttagtggagtcacctggtacgtagcctttgaacctggcctctggcttggtgtggtgtgacgcatccgtcgtgtggtcatttgtactcctgagtgctggccaccaggtggctgtgcccctcagtgcgtctctccattcttccttgagggacactgacaggtttctgggttttggtgatgggcagtaaggctgctgtaaggtcgtccaggtctgtgtgtgatgggcggattcgtttccttcaggtaaacccttgggatggggttgctgggctgtgtggcaggtgcacgcttatgttagcattgccctcacacctttctcagtcactaggtgaccgtggaagtgtgtctgttttggggctgtctactgtctttcgagctgtgtgtccttttcctgatgccacactttcctgatgacttgaagtcttgatactgggagtcctccaacttcgttattctttctcaaaaaattgttttggctattctagctcctttgctgttccatgtagactttagaaacaatatgtcagtttctataaaaaattctgggctgggtgcagtggctcacgcctgtaatcccagcactttgggaggccgaggtgggtggattacctgaggttaggagttcgagacctgcctggccaacatggtgaaaccccatctctacttaaatacaaaaattaggtgggcgtggtggcgggcacatgtaatcccagctactcaggaggctgaggcaggagaatcgcttgaacccaggaggcggaaggtgaggtggcagtgagccgagattgtgccattgcactccagcctgggcaacaagagcgaaaccccatcttaaaaaaaaaaaaaaaatctgcctgcattttgattggaattgatcctgtagatcaatctggggagaatggacatcctaacaatattggattttccaaatcataaacatagttcatctgttcatttatttaggtcttctttgatatctttcatgggtggtcggcagttttcatcacacaggccctgtgtatattctactagatttatagttaaatattttatgtatggcactgtgatgaatagtaccttagttccaattgattgtttattgctagcttacagagctagaatttgttttatttgcactgatttattctagtagtttttctgtagattccttatccagttttcttctctaatttgttaatgtagttaattacgttgtttttttaaaaatgtgttcctgggataagtcctacttgggcatggtatatgttccttttcatgtgttaatggctttaatttgctagttccctgctgcatctgtgttcttggtgttaaggtcatggtacgggtagtgtcatcaagcgaagtgggaagtagccctcctcctgagtttttcagaagggcaggacagatataggattggtatcatttcttccttaaaatttgggcctggagttttcctaatgggaaagttttaaactactactgtatgaactactaactataactatgactactctgaactactgttgagtttcttgaacaggtgtagggctgttgaggctactgagatagtttgtgtcttgccaggcattggtccatctcatatagatagtggaatgtagaggtgtcgggcgtctgtggtgctcccacacggtcctttggcatctgccaggcactgattgcttaggtttctcctgtgctgtttgtcagaagcaacagggatttgtctgcaggtcacttctgccatctgtctgctctcatgagctggagcctccacctgtccctggcgggttaaccctyagtagcacatgtggcctcaggcagcttggtgcagggcatcctggtgtcggtcttttttttttttttttttgagacggagtctcgctctgtcgcccaggccggactgcggactgcagtggcgcaatctcggctcactgcaagctctgcttcccgggttcacgccattctcctgcctcagcctcccgagtagctgggactacaggcgcctgccaccgcgcccggctaatttttttttgtatttttagtagagacggggtttcaccttgttagccaggatggtctcgatctcctgacctcgtgatccacccgcctcggcctcccaaagtgctgggattacaggcgtgagccaccgcgcccggctggcgtcggtcttttgccagaaacttctgagcgtgctctctagctgtgtgtgtgtcagccactgcctcagcttctccagggccagtcccgaagccgtggggtatgtgggttcttgtgggccgacagcactggacgttgctaattggttggctggttgacaaacccttgaggttccagggcctgatgtcttggtgagtgaccttccctggaaaaagacccatgttgatttgtgcacttgagaggagcagtgtcttctggggacctatttgaagacagtagccaagccatacctcgaggatttttcgcttgccaacctcagggctagtgccttcctcttctatgcagttgcagcgagttggccttgctgcttgctggagcggcgagggcagaggagctgcccactgccctgtctgtagggccagtrtccctgtggagcgggcttggcacactgtggagcctgcacagcgaggcgtgtgaatcatttgattctaggtttcctcgctgcccatgggccaggcaggctccaggtccctgcagacccctccagaacagggccagtgggggaagcactgtgagggtgtggctgatgggtaatctccagtgcttcaaagtgtggtcttttttggaaagaggatgattgcagatagaattaggttaacatgagatcacactgaagcagagcagtggtgtgatccagtgtgtctggtgtttctctaagaagagggaggaggggcagggctagtagtccatatgaaaatcggagcaatgctgccatagccaagggatgcmggggccaccaggagctggcagaggctccctagaggcttctgaaagaggatggccctgctgaggccttgatttcagacttcagaatggtgagagaataaacctcttgttctaagccactgactttgtggtatgttgtcacaggagctccaccagggaggttgtccatgctccagagtgggctggatrgcatcttcctttcacccaggaggcactctcagcttcagccaaagtcctagtctgggaaggcacagtgggcaatgtctctgcacctcagcctgctgcagcttccctatgcctcactgtgtggaatctccccatcacctcttgtttccctgtctgcctctcttgyccttcctgtgtgttcttgggttggctgcagagccagggtgatgacactgttggaagccttgctgggctgggcctctgctggccacctggggctgggctctgtgtagctgtgtggggctttggcctttggggagctgggccttttaaggccagcttttgggtctggctgactttccctctcctgtagtctcagttgtggcaatagtaaagcctctctgcaaaggtgctttatctttatagagttctgagaagggtgccttatggatcagaatcagatccaaataaggtgggcctggccagccagccatgtacctggggccctcttaggataccagactccatcccacagtgctcagggtggaagggtgctgtgggctctggagatgggcaactggacggtgaggtacggagcatgtcttgtacccggtgggttccttgcagagttgaggtatgaagtgctaggcgagctcacaagaacagacattaagcatctggggaaagccaaccgcaggcccagccatgaagaggccggtgggcctggtggggactcacaagcctctgctttgtgttgtagtattttaaccacatcagcatcgaggactcgcgggtctacgagctgaccagcaaggctgggctgttgtctccatatcagatcctccacgagtgccttaaaaggtagggtaggggggtgcctccccccatgagtcaggtcgggggagctcctctctggcgtctcatattcttgtggctgtttgtcccaaggcagaggcatggccaggtttccctgggtacacagcagccccttggccctggccaccagtcagtcccacaggcctgaatcgggcgtgtggagaattccctcctctggctgagatgcagtctggggagaggcttggtcatttcctaagggcttcccagagcaggcctcctcagaggcagctggctgctctgctcaggggacgccatctgttgtctgttttctcttaaagaaaccatgggatgggtgacacgtctatcaagtttgaagtggttcctgggaaaaaccagaagagtgaatacgtcatggcgtgtggcaagcacacagtgcgcgggtggtgtaaggactccttctctgctgcctggtggccgctgggcgggyggcccctggtgtggccctgcgcctctgtggcttggtctcagctgttgccctgkcattgtccctgagcccagctgtgtgtgctggccaccacacgttcagcctaaggcggactggcagccgtcctgcctgcactttccctgtcttttccctttcccccgctgtcacccctgtctccgtccagcccttgtccctgtggcaggaggaaaggccctcctcctcgaacagccagcagaatcctgctgctccctgtttctggaggtgtgcgtcttggcgggagggaggctctcggctgcgtggctttgagtggtagtgtcctcagctcctagactctgagggccactctctcaaggtggcagctgggtactgtgagactcaggtgcccagagcagtggcagagtgctgcctattcctgtagaatgtgccctggctggccctcggggtgtgggtcaggagggctgggagcggcagggggccccatgagcactgggtgtttgtgaccccctctccatgcttgctctttctctgtgtaggtaagaacaagagagttggaaagcagttagcctcacagaagatccttcagctgctgcacccacatgtcaagaactgggggtctttactgcgcatgtatggccgtgagagcagcaagatggtcaagcaggtaactggccatcagcaggtcccagggcagcctgtgctgccaccctggagcgtattcctgaggctctgtgctcagagggggcagagctgggcagctctgctgttgctcacagctgcctctctcctgggccacttgtgtggctttgtgggcaggggtggggtcgtcccagctacatctcctatcccagcctgctgggcatggtcagtgaagtgtgggtgattgggaacgcaggctgggcccagctatgtggcttgtagggagatggccaaagtgcaaggcagggccaggcaggagatgctgaaggtgcgcccggctcggaggtgtgcaaaggctcaggagccagggccagctctccctgcttgaaggagagcgagtgtgtcagggtagctctccctggtaccagtgccggtccatctctaacagaagagcatatgtgtaccatctgtcttgtttctgctgttgtggccaacatcctgcagtgtaagccagtgcccactcctgaggggtggagggtaacatggggaggtgagtgtaatcattttcctcaaatgattacagaaactctctgggttcttgccctcctggtcattggaaggggaagtagttgtggaggggttaggcctgcaggtggggcagccctaggactgtgtggtgggtgggccctctgcccaagccagctgccaagagcagggcctgcctttaggtccctgagaccgaggcctcggcactgtccccgaagaggcctttactctggacatgataagggagggtgagggggctcacacgggccaccagggcatgttaaggaacttgagagagatttttgggaagcaagttgaaatgtaggtagcacttgcttctgcccttgctgtgcatggtccttggctgtgacggagggagagaaggcaagccccactctggcccgggggtgggaaacttccctgagcaggagggggaaaggtcccagccaggcacagccacagcttgggggagctctggcatcccgaggaaccacagcacccttggggctggcctaagacgggaaggggctgaggccagcctgatgctgctctgcattcatggagtgtgcagagagctcagtgcctgaggctgatgggctgggctgcagcgtgctgttcttactggctatggccacactctggtttcactccttgatgaggactctgggcaccacgagcacctcacctccctactctgcccatggcaggaggccatataagtggcgtggtgtgggcagaaaggcctggcagctatggactgcccctcgctctctgctgctgtcagtgggcctggcatcactgaggcgggccagtcagcatgcagttatgttgccacagctcctggctgtttcgtgtctgccagaccctgggcrcgcctrccttcagggtcccaggcacacagctgctgggcagcgggcaggcygtagagctacagcctgcagtcctgagcgtgrggtgctatacttcccaggagacatcggacaagagtgtgattgagctgcagcagtatgccaagaagaacaagcccaacctgcacatcctcagcaagctccaagaggagatgaagaggctagctgaggaaagggtgagtgccaccctagcsggagggctgccgggccacggccattcctgtggcacctgtggagggacagcagaccccaggacccgtgcctgagctgacaccttggaaatgcttggatcctccttccaaaatcagatacaggcttttctttgagcttcgacatgtgtgatagttttataaatcacttcagttttggttctgttgttagagagctggcaggccagcctgttggtggaccatgaaggtcacagtcttggtgggccacctgagtcccatgtcctccctgggtgtttggaggtaggtcagtgcacctgccagggttgaatctgtagggcttggtcctgatgaagcctcctaaagccaccttgggaaccccactcaaagaggggcctgtcaggctggcagtggtgtcttctgtcttcaggcatcgtctgcctggccacggcgtgacctgcccacctgggccttctgggtgggagctttcttaagtgtggcagtcccctggcctgggtgagagccccaggaggtatctgctgccgcccaggccagcaggtcccttgctgctccctggggtggggcttggcctcctggagccagtgggactgcctggtttgcccctggtcggaagaggggctgtggggctcaagggcagcaggtgcaggacatagtgctcctggctgggcctggggcaagcaaaagctgggcaagggaggaacacccaatggggaggcctggcctgtccctgtaactgcacccaaaattcttcacttcttggtacatgtcctgattgccagggaggctgcacatgttgtactctgatggcaatgcagggggcctctgcaatctcaggctggcctgccccaggccttccctgctcctcctagcctggcatcacaagcactggtgcygttggggctccagggcctcctggcatgatctgctgggctctccctccaccttgtgtcttcccgagcctctgccaagcccacctcactggtacccctgacctttgttgttctttcaggaggagactcgaaagaagcccaagatgtccattgtggcgtccgcccagcctggcggtgagcccctgtgcaccgtggacgtgtgagggaggtggcacgggccagggcgcgggggccgccagccgcacttctgaggagaccagcagtcatgcatcgtgcaccacagtgtcaggcctccaacccaygctccttccctgtggccaacctgtgggcccggccttagggtggaggctttagtgtacagggacagccatggccacacagcacacatgtggagcagcggctctccctggaaagctccaggcctgaatggatggactcagcgactgcaccagtggcagctggtgactgtggacagtggtggaccctgcttctgtgcacctgctgcaggctctttttatgaaggctttcatgaattttagtatgtaatacgcactgacgacacatgatgcttggatgacagatgagaggggatggctgagtcctgtggctggcccgtgatgccaggtggcccatgtgcccagggcgcctgcagggctgctacagggacctggtcaggaggtgcacatggtgccctgccctcacccaccctctgtgtttccccttctttgaaaaggtagaagagaaaggaatattttaaacctttttggcttaaacagaattttagcatcagaactagctttctgggattggaggcaaaccatcaaggtggtccctctccagtctggacacgatgccagcaaggatgacgtcctgccacctcctggagttaccctggcctcctagggtccctttttctgatgaagtcttaatkccctaaaagcgcctctttggacactgaggccctctctgcctttcctggcctccggcaacagttttttacaaagattttttgcagtcgagtccatatgtccacccattgatttttaaagcttttgtgatattttagcattttgaaagactttcacagtgagartagaaggtagatttggaatcatrcattttagcaagtggacttgttgaaacaggaagcaagrgccttcagtgtagcccattcttgatccagagctgttgcctgtgacagcggtttctctggatgtcaaaggcagctgcctggtgcccagcttgcttctcgactggtggcccctatgggtgggtgtgcgatggaaatgtgttcctgccggagtctgaggcaccagggtgtgctcaaaggctggccctggtggtggactggcacctgtgcagagtgccgtgtgcttgtggtgcgccatctgaagcaagagtccagcgttctgccgtgtctgtcccccaccatgccccctacaggcggtactgayggcgcttttttttttttttctgtcaggaaaacaatgttggcctgtgggccgcccacaacatatccttccctcactacctgtgtgaccaaggttggcttctgttgacctttaaaaawgaaaccctcaactcaaattgctataattagacacttgcttctgtcttgcctcctgtctgcagctgtgaatagtcatttgactgtgactgttgcccttagccagccagatgcgcctgtgaaccaaagcttcgtgcacatgtgttcccctaaaggttggggagcctcgctgtgtcttgctgttcccaggcaccaccacagcaggtgctgccatactcttgtggtctctgtgcgccccccccccccccmacccgtctgccaagcatgggtatgaatcgtgcacacagccatgcttcaaggccggggcaggggagcctgtgctgatgccatccagrgcactgggctgtgcctggaaggcgagccttgattgtctgaacacataaagcaaactgtccagaagggaatggctgatgtctttattctgagggtgagaggctggcaccctgtggacccttgactggccagatcccctcctggggcctccctgcaggctggaccctgcctttgtaacagctgagcagcaccccagcatggccccttccttggttgatgccctctctgctgggctgagggccaggctggccacagaggggccaactctgcccagtgttctccaccccatgcccccagctggtgcagttcccagacctctctctgcctctcctcaagtttaagtatcaaatcgaacattcttttttaaagtaagctctgccctgactcccccagccatgcagagaggcttgcagagctgcctaggcctagtttggccctttccctggcacccaggccctgtgttcagacccctggctctcatcacagaaacaccctttgttgagcagttgtttattctggccctcacagccttggctagtccacaaaggccctggggatgggcaacaggctacaggaacccacctgtcttcctggtcagggcccctggcccctagcagcaggccaatcctggtggggcacagggttctgtgccctttggctgcctacctctgaatatcctggccagcaagccatgccttccccgcccctggggccctgggagcccttcagctcctgtccccataatgggtcctgggcctaggatgaggggaaggtcccagtttcttgtagggtgttatctgggggtcctggtgtgggttgagctggagggctgtggggccccaagacccctgtgccattggggtgctccaccctctcaaacaggatgagcatctcacagtgcggggtctgcgggaacaggtccactgccacagccttgaccggccggaagggaatgcccttcacccggttagatggggctctgcagaggctgtggggggaaaaggggggcgctaaggtcagccgataggctaatcaggggctcctgtgggagctgggggcttggtagcaggcctagcccccacccaggcccctgcagacactcactccacaaagttgcccatggctgcccgggggttgcatgagacgtacagcagccgcctgaggttcttagctctccggatggccaggatcaccttggaatctgaggaggcaaacaccagctgggtccccacagccagagagtgcataacatggtgagccaccccatgtgtcctcgttcccgtgccacctccttaagcaaaagccactcacgcaagccagcacggggtgggtccaggatggccacgaggtgctgggaggccagtctgctcaccagggtgggcaccaggtcctcggccctcccgcagtggaactccacattactcaactctgaagagatggcaccgtggcctgtcagagggccacatgccctcccagcagggccagccctggggaacccctagccaaagagcttgctcacttgctctacctgtcgggcagcccccaagccctggctgtggctgaggcttgcagcaggggtggcggctgcccccatccccacccccacccacggccttgccactcaccattgtcctgggcgttcacccgggcgtcctccacagcctctgggcatagctcgaccccaatgaccctctttaccttctgaaacaggaaagcgtggtgtcgccccacccagggaggggagtacatggggccctgtgggcagcaaagaggagctgggcctggggcatgatggagtcagctgtggtgactttgagctggggtcaatgggggtcttggggtggggagagggtgccctcagcagggcaggagggctcacccgggccagggccaggccaatggtgccggtgccacagcacacgtccagcaccatgctccccgcatccaattgggcccagtcctggatgactgtgtagagcacctcggctgcgggtgtgttcacctgggggcaggcggtgcccaggatgtcagtggctcctctcctgtggtgccactggtgccccgacgcccacattcctggtccctccatcctgccgggacctccggcgcccactccccaccttggtgcccaacgtcttccctgaccccaccttggaccagccttgctgatgccctcatccagcccctggctttaaaagccaagcccgtgctaagcacagcctcctccttgccccacttggttgagggctcatgaggccccgcaggccaataggctgtaccttccctgccccagcaagggggctttgcctcccacaactcacaccggggcccctggaatcacccaactgcagctcccacccccacacctagccctccaggaggtcctgccaggcctgtctccaaaaacggccgctccaggtccccacagccttcctgcagcagtgagcaaacagtgaaacagtatttcccagcccagaggccaccatggcctccctcctgccgagcccagagcagtgccctgtggtaatgcactgagggccactcctcatcctccctgtgacaagggccactgccgtgtgtacctctaggttatcccgagtcaaatcagtgatgaccaacctctttcttacttcaccctcccctgtggctcacctgcctggatactcccccaaatctcaccgcctgagcccactgttcccatcacgtcctgatggtgcgtcaggcctccctcaacatgtccccatgcccaccagggactcatggctacctggaagaaggcgtgtggagagatccggaaggtcagccctagcaggtcctcgtggatgcaccggtccccagccacatgctccaggggcaggccctcctggctaggagtctttctgtgggcgaaggtgcaggtccttcagtgtcacagtccctgcagggacctgccccgccccactcgggctccttaccgctgtccctcctccacgaagtagaggcaggtcactccactggccctgcctggccctgctgtgaagtgctgcgctagggaggtcttcagctctgccagctcctcagggctcagcttctggagtaagtggtgaaaagttcccatcaggctgtgctgaggcccacctaggctaggcaccctcccccagcagggcccccgttgagacctgggggtggaagtaggcaatggccatggcctggtggcggcggctggtgcgcacagtcagctgcttccagtggcctgtgtacgtctctgggtcgtatgccgagtatggagtggacctgtgggaatcacgagctggcccaagtgcccacaactgggcaagcagtccccctgctctctcctctggccacaccttccttcatctggctgaaatggcaggcactccagaattcccggggcaggatcaccaccctctgctcccacaccgcataggacttcccgggagccccgtcacaggtcctcaccggatgaactcctggaaggccttcaccacctgcttggtggcttcggggatgtgcacggtgtcaaacggggctgccacagcacacgtcccgcccttgtacttgccgagccgacagcccacggtgttatcctccccatccaccccgacgccaaccagaaactcacacttattacgatactcagtctgcagggagagagagctgcaccttaccctggctgcccagcgcttgggcctggaaaccctgatttccccacaggggctggcagtcaaacaagaggaacagctgacaactatgtgatgttaccagaagaaaacacaaagcagggagatcaacaggaagggtgagcaaaagcaaagtttttcaaaacccaggataggggtttgtggccaccgaagtctagtctgacctgctggggtgatggcctgaccccctccagcgggcagcaggccttgttgtgcttgtgcctctgctcgagcagccagggcagcaaggcacggttggtgctcccgatttccctgtaagaggagcagatcggtggttggactccacctactgcccccgacccatgccaggccactccccaaatgtccaggctcctgacccctcctttgggatgtcattgtgcccactgtgacgtgggtgtcttgctggctagctcccaaaggggccgccagatcctgtgctgggcctcccaactggtgcatggacaggctgaggaagcacaggccgggcagagccctggccaagaggggcgtcttgcgcccacactcacttggcaagtttctgcagcacctgctcgcactccagctgcttccgctcaagctgctcagcatagggcactgtccatagaggggtcaccacgtcggccactcgtgttactggtggctcactctcaccctcctgtcgcctcctcctggccatggggtcggccttgggccgggccaggcgcacactgagtgggcggcctttccagagggcaccatgcaaaacgcgcagggccttgtccctctctgcagcgctgcggaatgtcacaaaggcgcagggtggttgcccaaagagtttggttttgtggggctgcagaccaaagcggcccaggaagcgccggacgtcgctgaagctggcgtggcgaggcacgttctgcagctccagtttaaagatctcagaggtaaacaagtcatccctgatgtagctgtagagcccgggctgaggccccggccctgtagccgccccagcgccctctttctccacctcctccagggctgccggggctgcagggggcaccgagacggtagggcagctcagggcactgctgctctcctggccacagctctccatgggcttcgggccctgtgtggggacagatggggtgctagggtgaggactaggccctgggggcctggccccccaagcttccttatgggacacccagacctccgtcggtgcactctgcactcagccctgcccctcccccagtctaccctcccgaccccattcccgtctcctttcctcccccatcgcacctgcctcgtccccacctattctctggcaggtttcctgacccaccccgcctcctcccaccccatccccgtctctacccagcgtctccccgcactctacctcgttgtcgaggttctcactcatcgcccaggcggttctccgcctagaccagggacgccatgggggccgcctggccacctcgtcctgggcctgtcacaagggaagtggcctgtcacaagggaagtgctcagaggggaggtgctcacagagccggtgcaacgccgcgaggtcgccgccacccccggcttcgccccaggcggggcgggactcgaacctgcgatgctcaggtccgggtctcaggcttggggctgtaccgcccgcccgccaggggcccgcgccggccgctcgcttcgccagccactcttagtccgccagcgcgtgcggcggaggccgagcgtctctatgatcctggcttctggcaacgtcatcgtcacgcgccggatccaacccccaaccactttagccagctctagcggcgcgcgtggccgggacggaagtgcgcgcgggtgtcgccgggagtgcgcgctcctctggctgacgggcgggccgggcatgcgccgcgggcgttttggcgggaagcgcggggcgggccggacaatgagagtgtccgcctcctgagccaataaagctgtactggttttgaatcgcggcgcgtttcccgccgctggggtcaggggtcgaggttcgggtcgtggggcggagggaagagcgggcgggcgggaggcgccggcgccagacgcggagggaaggagctacgagtagccgccgagaggccgcggagccagcgacgaccgacccagccgagccgccgccgccgccgcgcccccatggcggccgccaaggtgccgccgggcccaagcggggacagggtgggcgggcggggccggggccgttatcagcggccacgtgggcggcccgcgccgccgccaccaacctccgccggcctgcaggctcggccgtctgctgggcctcggtggcgcggagtcggggcgcgtggggtttgggggctcgaggcctgcggagttggggcgtttgggggtgcaggctctgcaga

SEQ ID NO: 94493 - DNA, 28618 bp, Homo sapiens
cctggggccccaagactgatgccagctggggcatctcacagggagcacccctacctgtaaaccgcccagctcaagccctgcctcgacctctccaagtcagcagccgaccttccccagggcccctcccagcctgcagggggtctgaggctctgaggcttttctgcagcctctcagtcccccaccctgctacctgctcaggcagagagatcatggctctgggttattgtgtgcttagtgggtgctggagctcgtgctaaacaacttgggtgccccctgaatcttgacaataatctgagggggcattattattactattctcacttccccgaggaagaagtcccaaaccccgtctggcacaaagccagcgccccgagtctccctctgcagtccatgtgctcccacgtggggcatgcctgggacatcacaacatctggggtcaatgcggctgctgttgtcactgtggcattcagctttcccaaggctcacatctgctccatccagcaaaggggtcttgcaccccaagcctgcctccctcttcacacacacaatcccacttsgtcaaccacaaagatgcatgggtttacccagcctcaaccccatcggcccctccccttccagttgccggagggctcgggccccttcagctgggctcccacattcctgacccctggcctgcaggccctcaagactatgccagcccgggctcacctggtgccagacacctgcatctccctggggtgggggttgggggcagtaggctccgtggacctagcacacgtatgattcttggaaaatgtaaatgtctctgaggacagcgatcccagcttcaaatattgctgtgggctctcgggcaagtccctcctcctctctgagcttcagtttcccccgcataaaatggagcagtgatcgtagctcctgcatgggaaggttgtgaacaccatgcttgtcagcagaatataccctaattttgcaaggaaacaatatggcaggggtgggggggatctaaatacctttccttatacacgcattgaaaatgattatataaagtggtgaagtgtgattgcattcacataaacagtggcatgttctgggatctagcagacaatcttaacttcaggaaatgcaatcatattttactagctttgagaaaagtgaataaaatgtcatagctaaatagaactcaagtaggatctgtgaacggcagcatggagtggataaggggataacgtaccgatgagggaatttatatacccagcagcccaggtttggtgcaggctgataacggaaagacaaactccaaattaaatgaatgtgaatgaattcctttgcctgcggacagaccaaaaatatcggtaaaagtggctacagggcaagcagaaaaatgcaacaaattagaatgaacgcagggaaccatgtttctggcagagaaacaaatatttcagagtacaggtaagaggcacatggcaaaaaaaacaacaacctgactttgccagagctccaatgtcatgctcacggctgaggagaaacaattatctcgctgggaatgagtgcaagtgagagaacggaaggagtcctgagcacggttgactgcatgtgcccaggggcccggacaggcagcacagcggcctctctaccctcgaaggtctgtttcttgtctgcttcctccttgagagtggcaggccctggtaactggcccaacctcgggggcgcccagcagctgggtccccaccacatgcccaagtctggccctctcagatctgcctgtctcctgagctggagaacggagcccacccctccatccccgacactcatctcccatccagttgatctccctgaggacccccccaccgacaactcccacctggatcccctggccctggtggggcatcattctttcaaaataatccatgactgtgttcagtggctcacgcctgaatcccagcactttgaaaggccaaggtgggaggattgcttgagcccaggagtttcagatcagcctggggtaacacagccagaccctgtctccacaaaaaactattttttaaaaattagctgggtgcagtccagcctatagtcccagctacttgggaggctgaggcagggggatcacaagcccaggagttcaaggctacagtgagctgtgatcacatcactgcactccagcctgggcaacagagaccttgtctcttaaaaaaaaaaaaaaaaaaaaagccatcagctggctcagggtagccacctgccaagggtccccagctgagcgtaagacctgcttcctaggatttacagagctcctgtgaaactcggttgtttcattgattgtcacatggagccagtgactttcaggccagccttgttcccacaggtgggctctcccgtgggcctgggcacccagcgctaggcctgccctgctatggtctggatgtgagcagagatctctgtgatccctgtacccctcgcttctccccctgccctctctgcagccctgcccctggcagcccctgcccaccttcgcctctgtgcagggccacaggcttccttgaagcaaatgctagaactttgagctctttgctttttaaaaaaagataacagctttattgagatataattcattatactattcatttattaccttttgcattataccatgcaattttttccatttcaatggcacaatcgaatggttttttagtctatacacaaggttgagcagacatcaacactctgtagccccagagtatttccagaccccaaagaaactccgtgggccttggcagcccctcccactccccctgtcctccacctccaggcccttaccagtgccacagtcaccaggctacattatgggcttgtcttcgtgtgacttctgtctctatgggtttgcctattctgaactcttcatataaactgaaccataaaacttgtggccgtctgtgtctggcatctttctttcttttcttaaaaaaatttcacttttattttagagacagggtctccttccattgcccaggctggagtgcagtggcacgatcatagctcactgcagcctcaacctcctgggctcaagcaatcccctcacctcagcctcctgagtagctgggataacagacatagaccaccatgcctggttaattttgtatttttttatagagatgaggtcttattatgttgcccagactggtctagaactcttgggctcaagtgatcctcctgccttggcctcccaaattgctgggattacaggtgtgagccaccacacctggctatttttattttttaattgacacataataattgtacatattcgtggggtacgtagtgatgtttctatacatgcaatgtatggtgatcagatgagggtaattagcacacctatcatctcaaacatttatcatttctttgcattacgaacactcaatattctctttctagctagctgaaaatacataatttttgttttggtttggattttggtttttgttttttgtttttgagacagggcctcactctgttgcccaggctggagtgcagtagcaccatcacgactcactgtagcctctacctcccaaggctcaggtgatcctcctgcctcagcaacccgagtagctgggactacaggcatgtaccaccacacctggctaacttttgtatgttctgtagtgatgggatttgaccatgttgcctaggctggttgtgaactgctgggctcaagcaattctacccctctaggcctcccaaagtgctgggattacaggcgtgagccgtgacacctgacccataatatgttgttgttaactagagtcatcctacattggtgtagaacactagaacttattcctgccatgtagctataattttgtatccttcaacacatctctccctccctctccctcccttctttccacccttcccagcctctactatcctctgttctacttttgacttctatgaggccagctttttttagcttccgcatatgagcaagaacatgcggtgtttaactttctgttctgtctcatttcacttaacataagtttctccagttccatgcatgtgactggcttcttcgattttgcatactttcaaagttcatccatgtcatggcatgcattagtacttcattcctttttatagcttaatagtattccactgtatggatggatcacgttttgtttgcaccgttttgctgttgtgaatagtgctactgtgcaccagggttgtattcctctgtgtgccactgggttgagggttgggggatggtaggtgctcccataaagggggaaattgactgatactggctgaaatggaccaggctcttcattaagctggcctctgaatgttgcaaaagcattctgttggtttccaggatcactgcttaagacggttcctttcagtaccactgttgtccaggggagggatgggttcccggagcttcctgatctgccaccttctctgatgtcaccctcagaccctctgcttttgagccccaggctacagagtaaaagtctgatggtaggatgtgaggtgagggaccttccttgacccggcacccacatgaggcaggactgagaacaccctgaggactgcccgggtggctggggtgctgaagccaggcttggcccctccacaggccatgcatgacaaggaccaccctgtctctgagctttgccttggccttgccgtgacattttcaggtgtgtttcagcttagattctgctctggggtttcccgtgtaagaacagggatgacgtctaagcccttgtctggcatttgtcaggaatattgggagaggcaatgtggcagtgtgagaaacaagctcacccatccaaacctgaagaatggactcagaggcacgagcagtgaaagtgagacttttttttttttttttttgagacggagtctcgctctgtcgcccaggctggagtgcagaggcgccatctcggctcactgcaagctccgcctcccgggttcacgccattctcctgcctcagcctcccgagtagctgggactacaggtgcccaccaccacacctggctaattttttgtatttttagtagagacggggtttcaccgtgttagccaggatggtctggatctcctgacctggtgatccgcccgcctccgcctcccaaagtgctgggattacaggcgtgagccaccatgcccgggaaagtgagacttttaatagtggtcttgcgagattggtgtctggtggataggcgcactcagggcagtcacagcaagtaacttatgccctagcacacaagtccctcctcctcattggtcgagtactatggggttacaatcttccaggacattgcctaagtttcattatccaccttataaggttataccccgtcgccttccccgcttaagtttcaattttccaataacgaaactttcttcccttttatgggctgaccctttttctacattctgtctgcttattgtgatcttctacgtgcatgagccgtgcggtttgttacattctcaggctggctgccagtacttagatttatcatgccttgaaaatgggccatttaaaatgttttctcatggcggtaaatcggtgagctgactgtcatacactcagtcattttgcccaaagtgtgtgtgatgtggagggctgacagccttctccattaccagtgcagtgagaggtggcacagctggtgggaccccctctctctcatggatatgagtgcgttagaggggaggtcttgggccaggagcagatcagatcaacaggattatccagaaaatggcagtcatggcgagtattggctccagatggggagggttagggtcagggtcggctcttctcaccttcctgagcgagtcaccagcgtcgacaagttactcccaacatacagggcctgggtggaggctgagtgctaggaacccaggctccaattctggtaaccaggtgcagatgctcaggagaagaatgcagcccagacaagcgtggtgtgccctccagaggagaggacgtggcatcaaagggctgtcttcatggagagcaggaacagagactttgggaagccagggggccttggcctcagccctgctggcagagggtccccaccatgtagctgaagtgccagggtgcttgtgaggactgggtgtggtccagggtgactcagggcaaggcctgggggatgcatctcaaatccacagtcaccagcctagaaactggggtcacacttcccacatgggttcccacatgtggaaatttcattcactaaataacgacacatcaaggcagcagtatggatggggcacagctgtcaaagtcaccagcaacaagtgcaagaagagaagagggagttgcagccacataggtgcccaggtgggccctgggggtcagagagggcctgccaggggtagcacccaccatgctgaccctgatgaggagaggaaggagggtgtgggatgcaggggagggaaaggtgcctgagagcagcatgcaaacagcctgggctcaggaagagccgatggcatgacaggtgctggggagaaaggcgtgataggtgtggacaggggccacaggaggagggatggtcctcaggaaggggagactggtggctatggccggctgccgaggctagcctctctccagcaaaatgagcctggattcatccactccttttgtctctcccctttgctctgtggtgccggcaggaggaagaggagcagaaaaactgttgctccattcatcaggaagcctctctctctctcgagtggtggtgatggtgtcccccaggggcacctggcaatgtctggagacatttacggctgtcccgactgtgtatgtctgtgtgtgtgtgtactacaggcctctggttcctggaggccagggatgctgatacacaacctgcaatgcacagggcagctcccacaaggaaattattcagcctcaaatttcaacattgcagaacaggtcagggagtgcaaggtacctcctgctctttccagcaggtgcaaggtgcacagggagaagcaggtgggtgaggtgggaggaggctggagccagacccagcgtctgtggggtgcaggaatatcgtgaggtgacgaggggcccagcggtgagtgatggggaggggtgcactacggcaggccgccaggggcggttccaccaagaaagtgacatctgggaggggcattgaggcaaaggggccgcgagagggtaggtgctctagaggtggcccacgggcgggcggcactgaggccgggcctgcaggggaggcggtgtggccagcggactcttgtkgggtggcaagggaagggaagaaccacagggctgcacaggttccgagggggcctagtggtccgcatttgcccttgggtgggcggtgggactgggaggacaggagaggagcgcggggcaagcccctaagaggcctgaggggtgggagggagaggacggcttcccatacgcccatttagaccagaggagaagcggacccactttgagggctggattctcagccgatccggcctcagctgtgggtccacgcggctcaaggaccagggaggaacccaggtgtgcggctgcgctgatcggcgggctccggacccacctggctggcctggggacctgggaaacccggtgtggtggggagaccgcaagcctggtcaggggtcccgctcccaatggggcgggtctcctgtgaggaaggcggagctcagggcgggtagccccggggaccgggtctctcgcgggggtgtggccacggcccggtgggcggggcctgctgtggacgcacagaggtctgcagcgcgcggggcggaacctcccgaggagagggcgcggctgggagcgcggggcggggccttccgaggagagggcgagactgggagtgtgaggcagggcttcccacggaatgggggcgcggagccggtcctcccgaggagcgggcgcggctgggaaggcgggtcgggtcctctcgaggagcgggcgcggctgggagcgcggggcgcggcctcaagaggagaaggggcggtgggtcctggggcgtgccagaacccttgaggaagaagcgctggtgttctggagtatgaccaccggagccggccgggcctcgggttggggcggggcctcaggggtggggttgggacttcgggatgggttctccagaggtgagagctggggtcgtagggtggaccggcgtctgctgaggaaagggagctgcttggagcgcggggcgagggactcacgtggagaaggcgtgggccctacggcgggcggggcggggcctcargaggagcgggtgcagatgctagggaggggcggggcccctgggatggggcggtgtctcccgaggagtgggcgcggctcggagcgtgggacttctaaggagagagcgcggctagggggcatgcggggcggggaggggcggggcgggaccaatagcgcatacttaagcggcccgggcgggtaccggcgtcccgccatggctctgcggcgcgtcttgcccgcgctgcgcccctacattccccgcttcgcgccgctgtccacggcgccggccgccagcgagcagcccgccgcgggcccaggggccgtgccaggacgtgggtcggccagggcagtgcggccgctggtgcccgccgtggacttcggcaacgcgtaggaggcgtactgcagctggcgaacctgggagctggcgcgcagcctgctggtgctgcgcttstgcgcctggcccgcgctgctggcgcgccacgagcaggtgcgcggggtgcagccggggcgcggggcttctgcccgtcccgggagcctttacggagtttcctggcgtgaaacgggtgcctcccaagcatctcctggagcaagggaagccaggaagggaggcgtttcctgcagtccctttctgatatcgcgaattttcctacttctcgatgtctaccaactaaaaacaatggtcgttttaatatttacgatatataccacttgtgggaatacagagttatcacttggaatttaaaatggagtattcttcatgttgacacaagagaagcctggtgtagggctcatagcctggaaccccagagttcaatccccgggacccagccgcttcccagacacggccactctgagaacactgttggggaaaaatgggaagcccctcaaacgcccagctttgaactcacccatggtaactttaaaaagtgtcagggcttttggtggcggtggtggggggcaacaagcagaacactgttttagccgcatcagcctaggggtactagagatgacggttatctccaggtgaccctgggaagagtttgcaaggttccgctttttggcgccagggtatctggtggtgttgatttctcaggtgagactgtacagaggtcgggggctgcacccctggcctcaacaggaggcgggggaaggcgggggacggtgtsagatgagaagcaccgagccacasttgagcttaggtgaggcctcggcgggtgcgaggtgagggcagggatccacgaactcagagtcagatgctgttggcccgaatcccatggggagcgccaaggtcagcctaggacccgtggtggcgggagtgcggaggatggtggaggaagaaggagctgaactggacagatggagggctctgggagggcaytgctgtgcktgtgcacacaaggatgtcttaaggtcaagttttggycatagagagccccggccaaggagacaggagggcgagaagggacatcccaggtagaggaactggcaaggtgagggacggcgatgtggaggctttggggagtgcccacatctaaggggcatcccaaaagaggagccagtgctggtggtgctgcaataggaggaggaggcagcagggcagraatgccaggggagggagtggccagccacagggcaaggacgggcattytaggtggcagctgagtgggacagagactagccatgcagaagccatgcccaccttgtggccaggatgtagtgggggctaggaaggcaccaggtcaggtttcttttttcttttttttctttttcttttcttttcttttccttccttccttttcttttctttttttttttttttatggaattcgctctgtcaccaggctggagtgcagtggcgcgatctctgctcactgtgacctccacctccctggttcaagcgattcacctgcctcagtctcccgagtggctgggattacaggcacgcgccaccacacccagctaatttttgtattttcagtagagacagggtttcatcatgttggccaggatggtctcaatctcctgacctcatgatctgctcaccttggcctcccaaagtgctgggattacaggcatgagccactgtgcccagggagctggtgccgcatcttctgcctgggaatcccttcctgacacagcctctgggggccagagatggggggagcagggctccaggggtagagaagccagaggtcactaaggcccagtgtccttccgtgttagaaacacccgaccctgcacagccccatgctggccccagcagccctccgtcaggggcagcgggtcccaggcctgtttatgtttttgtttgtttgtttcaaatgagactgggtcttgctctgttgcccatgctggagtgcagtggtgtgatcatagctcactgcagcctagacctcctgagctcaagccatcctcccacctcagccacttgagtagctgggtctacaggtgcatgccgccacacatggccaagtttttttttttttaatttttgtaaagaggaggtctcacagttgggcgtggtggctcatgcctgtaattccagcactttgggaggtgaggctggtggattgtctgaactcaggagttcaagaccagcccgggcaacagggtgaaatcctgtctctaataaaatacaaaacattagccaggcatggcggcaggtgcctgtaatcccagccactcgggaggctgagacagaattgcttgaacccgggaggcagaggttgcagtgagccgagatcactccactgcactccagcctgggtgacagagtgagactccgtctcaaaaaaaaaaaaaaaaaagaaaaaagatgaggtgtcactatgttaccctggttggcctggaactcctgggctcaagtgatccccccaccttggcctcccaaagtgctggaattacaggcgcacactaccacacccagctaattttcatattttttgtagagatggtatttcaccatgttgcccaggctggtatcaaactcgtggcctcaagtgaaccttccactttggcctcccaaagtgctgggatgacagggcataccactgcatctggcccttctgagcagtgcttggaagccacctcctgacgggggctgggggtcagagtggccagctgaatgctgggccatcagggtgaggggcgttttctcctcatccattgcctgttctcctggggcagatgtaaggggaaggccctgcactggggtggtgttaaacaagatgagatggtaagatctgctttcactttaaaggaacatttctggttgttgcttggaaagaagtgtcaggggcaagaatgctgcaggagggctggcctggagggcagggtgggactgcaggctggctgcacgggggcaggagcctgcgcttgcgtcagaggttcctgagagacttgggctctggggcagaggcctgagcaagggggcctcgctggggtgtctctgtcttagccacactcggtgtttctgggtcctgtgacccatgtgtgagcagcctgtggtgctggtggcacagggraggaaaccgaggcagggagcctgtgggggctgctcggcaggggacaggcagctcctgtgcccactgctgtcccacacctgcatggaaacasaaaccccrccacggagccccctcycatctyyacagggcctcyagagcgccatgtgcaagracttcatgggcggggtggggtggggtcaggagcctgctgtgggctggccaggcatgaacaccaagctggaggtggcggtgctgcaggtggggcagccttccccttccccactcctgtggcttgtgagggggtgggcaccgtgggggcgcacagggggcatggtgggcagtggtcggaggtggttttgggaactcacccagggcacrtggctcactctgcagctgctggggttggcctggtggggaggaggaggtcggagggactctgaacagagaggggagatgctggcaggagggctggagacccagccctgcagggcgtgggcgtgcatcagcagcggggtgggaatagacctgtctatgcagtagaaacaaaccagacatggatcctgttcttactaacgatgtaataaagccagaaacagcaccagaggccaatgggtggggggaagrataaaatgtgagcgaatggggctgatccaggccttctcacttctcaaggaaagtgtcgcaaagatgggcatcgcatccagggctgagattgaggactggttcacggcagagaccctgggagtgtctgggtgagagcagcccccaggctgagaggacacgagcatcagccatggttccagccaagccccagtgacgtctcccagtcctggctgccctgcctgagagggtgggccctgggatgacagtgctgaaggaactgcttttcacacagcaggacttgatggcttcaggagtccctgaggctggggctgggctgggcaggggagacacagggccagcacagaccccatagagggctctttatagaattatctgggtccagagcaaaggtggcactctcagccctccctggagtccacgccggcaggtgaaggatcagagccccatgccccatccttggggccaggggctgggacccaggtcaccaggagcctccagttgaagtggggaggtgactggggtggtgcagtagtgagccatcccctcacacactgccagccttgcccactgtgtcctccctggccgcccggagctgtgtccgcctcctgcctggctgcctgtgctsggcccctccacaagcccaaaacagccctagggtastcagtgttttcagagccgcctagatgcaggactgtttgtgttttggttttaaatttttttaattaatttattttttatagagaccaggtctcaccatgttgcccaggctggtttcaaacccctgggctcaagtgacctgcccgccgcagcctcccaaagtgctgggattacaggtttgagctactgcacgccactggttttaaatttttaaacagaaaacaatatttacatttcctctgtctttttttttttttttttttttgagacggagtctcgctctgtcacccaggctggagtacagtggcgcgatctctgctcactgcaagctccgcctcctgggttcatgccattctcctgcctcagccttctcgtcttttaaaactgaacactgaggtgggttttgtggtggttggtgaacggacaggtttgggcctggatcccccacccgaccctagcacccacaggtggggtcgccaactctgctgatgtgcctcctccctcagcactgtggacctgctggactggagcagcctcatcgacagcaggaccaagctgtccaagcacctggtagtccccaatggacaggtaacacctccgctcctcagtgaggcccagctcagcagggcgctgcgctaagaagggaattcagcctgccacatgtttctcttgttgcctaccctgggaacttaacatgaccaagatcactgcacactatggccccacagaccccctatggtccagggggaaaagaagacaaacccactagtgtccacagagtgcttggtgggacagagacccacgcggagccttaaaacaccacaaggagagggggtctgggggccttccccaagtcatctgtcttgtgcatcaggtcaccccaaacttcagaggcctaaaacggcagcagccactctgcttctgcctcatggttctggggttgacagggctcagctgggcagtcctcgcttggggtctcctgggtagctgtactcacagagtggtggcgctgggacctgggggaggcgcccactcacatgtctgggagttggtgctggctgtggcttgggctttttcccaacatggcagctgggctctaagggccagtgtcccctgagacgtgagagccaggcagaagctgggtgaccttttcctgcctcacctcagaagtcacacggtgtcttttctggcaagttctgtttgttagaagcatgtcaccaggccagcctgtatactgcggggagaggaatgagactcatctgcctgtgggaggggggcccaggacctggctgactgcttgaaaccacaacctaaactggaattcgaagaaagaacagaagcaccttcagaaaacatcctgcagaggcagctttccatgacacatctagccccagtccactaagggcccagcctcaaactcagagcccccgacccagagcctcggggcgcagtgcgtacagtgtggctgtgcaccaaggccaccagctgttggagactttagcatggtgtagcaagggatagagtggtactgcttgtgcccagtgaggcaaggctgctggggccagcaaaggggtgagcgggaggccctgcgggatgggtccccacggcctctgagcaccagctccttgaaggcctcatcctggcggttgccctggtccctggctacgtgtcagcacgtgctgcacaactgccctgtctgcctgtagccaggggtcttcctcctgggccctcttcctgctctgggtggagcccttctgtttgacgattgggtgrtcagtgttcacttcctcagtgtcacatgggagctgcagggggccctcccacaatggtggggcctctgtgagaactggggaggctgttagagtacacacttcggagtgcaggcctggactgagcctggggcccactgacatgggcactgagctccctcctggtacccccagggcccgcgtagggcagtgcactggctgcgttggaggttccggggctctgtgctgcttgtccaggtggccctccctcccggccctgcatgagagggttcccgtgggctgggaacactaagagaggtttagcctgggcctcagggtggcacttcctggcccttgctgtggcctgaccatgtgctgtacccccagacaggacagctggagcccctgctgtcccggtttgctgaggaggaggagctacagatgacgaggatgctacagcrgatggatgtcctgcccaaggcgagctgtcccgctcgggcagagggctggggccttggggacccgggactcatgcagaagagggcacctgcctcacttgagcaatagttgctcccactctcccaccccctgcgcctctcagaaagccacagagatgggcgtgcggctgatggtggatgccgagcagacctacttccagccggccatcagtcgcctgacgctggagatgcagcggaagttcaatgtggagaagctgctcatcttcaacacataccagtgctacctcaaggcaagcccccgctcagcccctccctgcctgccttggggcttggagaccccacaggaggggctcctctcatctgagctccctggcatttgcctggttttatactcagcacccaccagggagctcacgggatggaggagggagtgggccgtgcccccaaggggttgttggggtcttctgcagcacagctcacccagcgggccccagggtccaggaaagagccccttaggtggtggccacagccaggcctgcagaggaggccgaggccagggtractgcctcagagtagcaagaaaggcccgctgcccgcagcctctcccctggttctcagaaccagccaagagtgtctaaggagcaagaggaagacaacgatctttatgagggtccactagatgtacccgacaccccaaacttggaaggtgtcacatgaccatttcctccagcgtgttttcagttcagcgcccctaagaacctcatgaaagctttgggccctccccggaaagactcacccaggatgtcacatgtattcagggagcccatcctagcctgtgggccccaaactgctcagggatgttagcaggtccagagctctcaggggtgagccgggtgcccagaggacacagggtggcatggggagggggtccaggcaggagcatgcagtatgcacccctcctggtcggcctgggagtctggagcacatgatggctgctggcgcctgggctgcccccatagggctgtccacaggccacagaggaagctgcagatgtccccactgccattgctccctggagacagaggttggagaaccatcctcacccacacctggtccaggtgccttgagctgcacctccccaggcagctgctgcccagccctggtgactgcacctgggcccaggaaggccccatcctgctgtcacttgggcttgcccaggctccctgtgacttttggccctggccccacaggatgcctatgacaatgtgaccctggacrtggagctggctcaccgtgagggctggtgttttggggccaagccggtgcggggcgcatacctggcccaggagcgagcctgtgcrkcagagatcggatatgaggaccccatcaaccccatgtacgaggccaccaacaccatgtaccacaggtgcgcagctctcccacccctctgtcttctcagggcagggcgccaagaaaccaggcctgagggagaggcttggagactgaacttgtcagccacatgtgtccccaggtcagaactggtatttcctcagcttttatgtcatgtgttactttttcaaaagcattaaggttattcttttataaatatagaaaagcctattgaacaaagtaaaattggccacagttccctgagcctgctcctgcagacacttagatccagagatgtgcatgaacactcggtcctccccaccctgcaggctcagcctgtttrcttttcagttcacacagtgggatcgcccatcagctgttctgcacctgcttttactgctctagtttcttggtgatcttttcatgtagcacaggctggccaaccatgggcttttcctcttagaggcgtgtgtgcatgctgcaaattcagagagaccccaagtgcctcctggttggctccagctcccctcctgcagccgctgtgcatgtcgtgccacagcgcacacatctccgccattgttgtttgcgctgtagcgtgtcctctgcccgatgtgtttttcatttcgcgttccatctgggtcctcttgtgtgggcttgcagagtggtgctgtcaacagccagcatggagtgcccggggctatgtgtccagcatctttgatcttactggttttcagtctggttattgtaacagggactcgctggacataccgtcaccctctgtggtacacacgggccgtcaggggttttgtgtctgaggatgcagctgtcctaggttgctggaaatggaattgctgggtcagagagaaygtgcgcrtggtcaagcctgctgagtgtcctcrctgcaggagggccgtactgctcgggcttcctggtgcaccgggatgcccacccccactgtgccctacagggacctgcttcccttttatttcctttcagggccaggggtgcactgtacgatccctccccagacgcaaagctgtgtctgtcatgaggcttatgggcatgtttgggctggtccccagagtcacrgcaygtttgatgcagggacgctgtgccccagctggttctgtgtgaattgtctggtcccagacatcgcttttgcttggttgctggtctttctttttcatgaggtgctgggaggggcagatgctgctcctgttcctcctgatcctgtggatacccttggaaagagccagctcactggatggatctgggtctgccttcggcctcctctctgtgcagctggtaatgagagrtgcaggcgaccacaggcctggaactgggctcacatggcactcttcacaggtgcctggactacgtgctggaggagctgaagcacaacgccaaggccaaggtgatggtggcctcccacaatgaggacacagtgygcttcgcactgcgcaggtaggtgtgccccaccctgcaccgaaaccccaacctgagccgttgtctcctccagctggggagaggtggcagcagtgcagagctcagggtgggcagagtgacctgctgggtggtcgggcatttgtggggaaaggctggtgaaatgagctggagggtggcttcagtgggcaggcccaggcccgctggcattctggacatcggactgtgagagcacaatggctctttgcagttacgttggtttttaaaattaacttttttttttagatagaatctcgctgtcacctatgctggagtgcagtggcgtggtctcagctcactgcaacctccgcttcccaagttcaagcaattcttcatgcctcagcctcccaagtagctgggattacaggcatgtgccaccacgcctggctaatgttttgtatttttagcagagacagggtttcaccatgttggccaggctggtctcaaactcctggcctcaagtgatcctcccttcttggcctcccaaagtgctgggattacaagcatcagccactgtacccagccttttaaaaattaacatttgacttattaaacttcacaattaaaaaactaaatttcatcagggtattcggatggctcctgaaaggtacaaatgtagtgttggagcccagtccctcaggaggcctccacagcgctgcctcatttataagcagttcccttaacattttaactacatctggaatgtaacggtttgttttctctttaaacatttgtcccatggagcacaacttcggtagaattctaacaagtcaaatgcagaagttaggtgaagtcagttcttggatactcctgtactgtcaccctggtcttatctcatgccttagcccaagctatgcacacaatggggtcctaggtccccctcccctcccagattccgccttcccagggatgggaccccctagaaccctcggaggcctgggcagtggcctcgctggctctcgccttcctaggagctgagcaggagctccactctcagcagggcagggtgccccagatccatgacttgtggcacgaaggggctccccaagaagctgtgaagccacagggccaggcttggggccagggctgcagccaacaggacacatcctggtgctgctcgggagctgactcacggctctgaaatcattcagtgatgtccacattcagcctttgtttacgatgctgctactttttcatggcctgaaattgcagcacacccatttttgtgccctgatcctctgctaattgtcatagatgtgtcggtgatgggacagactcactttctccacaygcacaggcctggtggccagcactgcccagcactcgggagctggtgggggttcctctcagcttgtaatcaggactcccagcctctgggtggactctcaatgctggtggactcacagcctgactagacacatcaccatccaactccgaaaggacagcctgccctcagcagggcttcctctctccagcttccgcccggcacctgtctgtccctactatcttgctgtggcagtggcttccccartggacacagcttccccctcccctgagtggcagccgggctctctcctcttggccccaagggccctgtgccaggctcccccagtaccacgctcacatccctgcctgagaggctggacccctgcargcttcagctctgcccctgctgtgggtggytggggagctctggggagctggggtcccctcccatgggtaagtggttctagactatggcagctgctctgtcctgtgctgggcccagactgccacaccacccaccctcaaacaacccgagttggctttggccaaggaacaaaccagccccaaacttagaggctggaacagtggcatgttctgtaggccaggggtgggctggctcagctgatgcttctgctgctggctgtgcctgtgtccctcctgcgtctgtgatctggggccggtggggcctaatgagctcattcatggctggkgtagtaaaggagactacatccygggtccagcgtcccacaggccagcccaggcttgggcacgtggtgggctcaggcttccagaaggcctggagagggcaagcctctgcttgtgtcacctttggtacctccctgttggccaaagtgcctcacgaggccaagcccagatgccaggtggagtgagccactgtcctgtgctgggaggagccgcagtcacatggcagaggctgtgcacaccagcaggggagggggcagccagcagtggcacccggctctcgggttcatgtcctggggttgaggaagacacaagatggaagccagggcgatgtggcagagatgggtgcctgctttagactgggtggtcccgacactggagcccagcccagggatggagggaaagggcctctggccgatgggtactctgggagccagggctggggcagatggagaacaggggaggtgaggccctcggggagggagtgggaagcacagcacaggcactgccagtcacccgggtgatgcgtgagcagcaggcggaactcgccccaggctgggggacccagtgctgtgcagaccagcgaagtcgggatacctggatatagtaagctggagatgaaacttgagaactgtcactgcgtggatatttcaaaccctgagaatctttgtaagaccctatacggggtggtgtgaagacaggacagagtggaggccccaccccagtatctgagcagtgctaatagatgtataatgcaagccacatctgtaatttaaagttttttggtagctacgttaaaagataaaatgaatttcaagaatacattttaattaacccaaaatatacaaaatattacttcaaattgtattcaagttgattttagaaaagcaatgcggcatcgtgcatttttctagaaagtctcctaaatcccgtgtgtatttgacatttgcaacacatctcgattcagagcagccgccttccgaggactcgggggctggtggcagctgtgtgggacacagcagctgtggggatggggcagagcagcagcccacagagggcgagggcaggggccggagaccagtcataccacagaaccctggaggggcttgaggaagggatggcaggagagctgaggagcttctctgccctgtggggcaggctgctgggtgggtcaaagccccagaagggctgcacctccaagaagggaggtagaggagaggtgggagagaggagggtagggaaggcaggaggggggccttgttggctaagggctgaggcctccccagggagaagagtagggcagcccagcagagtcctgctgggaagaggcctcactgggagagggccggacagagcctatatcccaaccccacttcaaaggggataaagtctggagagtgtagatgggggacctggggtggcaggacagggtcagagctgggacaggggccctgtacccctgcaccggggacagtgtcctggaattagccctcagctcctggctttacctgcacaggatggaggagctgcgcttgcatcctactgtactttggacagctgctaggcatgtgtgaccagatcagcttcccgctgggtgaatggggccctccctggtgcgatggagtgtggtgctgggcctgggcctcatggcattatctgcccccatgcaggccaggctggctaccctgtgtacaagtatagggctgtaggtgctgtcatacgtgtcctgccacgccctggagaacagcagcctcgtgaagggtgcccgtcgggagcggcagctgctgtggctggagctcttgaggtggctccgaactggcaacctcttccattgccccacctagcacccccccgcccccgcccaggccatcaccacagctgcagccaaccccatcctcacacagattcaccttttttcaccccacacttgcagagctgctggaggtggagtcaggtgcctcccagccctgccaatggtgggggcactcaggtgtgggctgaccctgatacctgcctgggatagccgctggtaactgttaggaactttcctcggatgtgtgggcccaaggcccccacctctgtgacccccatgtccttggacctagaggattgtccaccttctcccaaggccagcccacatagcccgagcccctcggggagcagtggccgggctggggaggcctgcctggtcaataaaccactgttcctgcagctgagagccctttgccctcacacagggtcagctctgggcaacaaagagggagtggctcagacagggtcagagaagtctcatcccaaactctggcttccagcatcatctgttcctggaggccaggccctgcgcagacctggccacccagggtgctggacacccccaaccctgactccacaaggacccagcagggcccatgggcccaggccagcacggaggggactcatgcagatgcagaagccaagctccccaggtggccctggcatgcctccccgcagggctcctcctcaggccattcctgccaccctgagtcctctatcccagtgacctgcatcaggctcctcctagtggttcccacaggacactgaccaggctgcggcaggcgcatacttgcactccgggccttctcccatgctctccagcccccagccccacaaagcaggctggatgtggtcctcatgccctggggcttggatgggggcccctgtacagatggcagtgacagcatcctgggaccagggctggggcaggaaaggctggagggtcccagtctccaggcagggggaggggtggtgggctgggcacacagcccaggaaggggcccccaggtagaggcctctgctgcaacagaggtgggggccctaccagggccccggttatggcagaacctgcagctatcacacaagccacatgtgggccacactgaggcatctttatttctctgggtcacacagagcttgggcctgggagcctcttctgcatgggggctgcagctgccaagggagcggctgagaccagaacaagcgctcgggtgggccccagtgcaggttgggatgtgcccggtggagtaaggtgtgagaacccccagcctcactctctgcctggtcctgaagcagacagcagcaggctggcccagcctcccctttatgagactatcctagggtttgacagcaagtcccagatgaagggtgacaggcagctggggtccacctggtctctcctcagcagggggaaccccctgcgggcagctgggaaggcagtggccaaaggtcaagaagatgaactctgcccagacttctgctgcctgtggctatggtgggacagggctgcctttctggtcacactgggcagcaggcgactgccagggacctcccagtcccagggctgcattccctgcccggcagcccctctgctgcagctttcggatgagttccagcaggttcatctgcagcatcagctcctgggatacagaggggccccatgaaggccagagtgacccccaggcccctttcatcccggcccaagggtgccaggcagtgagcccacgggggcgaccatcctgtgaagcctggtcatggcctgccaggacagggtggaatctgagcttctgcccccaacagggccactcggaatctgagcctctgcccccagcagggccactcggaatctgagcctctgcccccagcagggccactcggaatggcatgcgggaggggagcagaagagggccctgtgtggcacagcaggcctggagagggtgggcagtgcccatggctggctggctcaccctcctgtagggaatgggcctggcctccgtgctgggaatggcacagaaatcctttccagagcctcaatccttccacttcacccccataccctgagcctggctccccagggaccagcagtaaaaccccagatggaatggggccccggggcactcgggctagggcagagcaggcccaggcactgacctgtgggttggtggtcacgtagaagccagccacccccgccttctccagtgtgctctgctggtcagccaccttccggtccagctccaggatgatcttctggtccatcgcccgctgctcctcacggatccggtgttccacggcctgccatggggccagggcgcggagggggagaggtgagggcagctctgccatcagggggcggggaggtgagggcagctcaaacacatgctcctgctgccgtccccagtggcagcagctctgacaccaccggtgcatcctcaccacacccaggcctctcctcggccatgtgaacccctgaagggggccccaaggggcttccacgaatgccctggcttgggactgccttaggaccacacacacatctccacaggcacaccctgccccacggcttgttggttacatgccagtctctggttgtccctgtgctccctgggagaaggatgggccccttcctggccccaacaccctaccattgcctttgtacccccctgaggccacctgctctgtggaggcccaaacccacgaggagctgctatccaggggagcactggtgggttctcaacctccacccagccccagcacacttggtatccgcaaagaggagccacctggtgggactcactaggcctccagtgtcccactcaggcccaggacagccacccatgcctgagcccccacaccccttcagctcagcccagtcagcagagccaggtggtgcccacaggagagctgggccggccaccctgcctgcgcccccagtacctctagttctcgctgctgagccgcctgaaccacaggcaggttgtggggccggcaggcctgctgggcttcctggtgcttctgccgcagcgcctgcctgagcactgggagggatgagagcccgtcagcaggcggtgggactcggcagcagccctcacccatgggcacctgccttgccagcccagcagagcagccaggccaaaggggtgtctgcaatggggaggatgccagcctcctccatcctcccaccccactgtcacccagggccgggcccttatctggtggcaagtctccaggggactccagaaggtgcggggcactgaaagagtggggtggggaagactggccaggtggggccaaagctgcagccccagacccagggcagctggaggaggcaggcgggagggaggctgcagtctgagggcttcagggcccccatggccacaggccatgagacatctactcaagtgtcagagaccacctcaggcaaaggcatgggaaaggagcaggaggagcggggtcsctgaccctgagcgtggggcctctgcctaccaggggtgtggtcgggccctccaccctcagtgctgcccttcagggtagacagcccctccctcatttgcagctcccagcccccgcacagcgccagagggagaagggtgggcagacctgggaggcccaagtttgggatgagcttggggtgccataagcctgtgtggctctgaggggctcaccctcagccatcaagtaaagctccacggtccttgctaaactgtgcacaaacacagatgtgtgcaaactgtctggtctgaagggaatgtacagaggaagcgatcatgggacataaaccaccatgaaacagaacatgcagcaccccacagctggcgccagtgaccagtaagtgccaaatggctacagctccccaggagggaggggtccctggccaaaagaaaaggtgaaacccaacactctgttcctgggaagagccctgatgttgcagctcttctctggtggccagtccccagggaactccagggcccctgaggctcccctgcaggtagcctggctcccgctgtgcctrcaggcttccccgatctcctgtctcttcacattctgtacacacctcgacgatggtatttaccaaaagcccccctcaagacagctccataacacagggaagcagggaaatgtcatctccttcactctactgatcaaacattgctacaagtgccaggtccactaccagattccactagatagacaaccaaaaggcaagaagagagccacgctggctgcctgggcagaaggggcctggccttagacatgaccagggaacacaaaggaggcaggagcagccagtcgcccctgccaaatcagcaggagaagcagaaagtcaatgcaggcatgcctgctgctggtggaaccagggcctggcccaaaccttctgaagcacaaacagcattgggcccaggcagttactaaaactccccatcctgctataaggaactatagctctgtggaaaaatggccgattccaggactgagacacggagaaaacaagaaaagatgagcctgaacacatacctgaaccagaaagcaagaaagtgctcacagaatgatggggcggcatctaaaggtgcctggagcgcccccaactggccacacatggcacagtctgggcattaaggaataatgagccatgcgcttgggattagtaaactacatacatcttacagctcaataaaaaattttaaaaagacaatcgcccagacatttaggggaagaagtaatgccaattctacacaaactcttctggaaaactgaagaggagagaacacttcgaaactcatcctataaggctggcaaaaaccctgatacccaaaccagatattacatgaaaactatagaccacagtttatcatgaacatagaccaaaaaattcttaagattttagcaaatcaaatccagcatacataaaaaggatactacagcacgacccagtaggatggaattcaagtgactgtaattcactgtagtaatagaaaatgattcaccacgtgatcatctcaagagctgccgaaaagggaactgccaaaatccaacatccattcttgataaaaacacaccaatcctggagcagatggacactgcctgccttctggggaagggggccttgcactgctaggagaaatttttgccacattaaacctgcttctaatcaggcttctaccagcagtccagtgtacaggaaacccagagagtggagaagcaggttaaatgcaagaggaagcatttcgtctgatagatcaagagcagggcattctataaaattagaatgccctggactctacaaaaaagtcaatgccacaataaatgttggggactgtttcagaagcaaagagaccaaagtaaccaattgtagtacatgaacttggactggatccttacttataaagcaacaatttgccacaagttaggtaccatgatgtggccgtgcactgaaagtcaggagacacccggaacagttaatttctcagggggctaccttctgcagctgtgtaggagaccagttttgttctagagcacttgctcccaatccaaggccaaggttgaccccaccacccaggttgtctggaggcattcttggttttcaggactagggagggtacccctgccatcctgcaatgcgcaagacagcatctcaccaaaaagacttacccagccacaaatgtcagcatggctgggttgaaaatcctggtctccaggaatgctgaagactcttggtgaatgctatgctgtcacatgtatatattttgggatgtcaagaactagagcaaaacgttaactattgaactttagtgaagagcacaagcgtatgcactatactatcttttcagcttttctaaatgttttaacttctaaaataagaagtttgggaaaaataacaaaggtggaaactgatggtgcagggggacctgccctatataatttgcaggaaagggctcccaagcccaccaagcaggcctggctcaagtgggaagctcttcgggtttgggagggcgccacaggagacagtgcttaggaatttgatgtgcaactggaatgaggccctgcgaggcctgagagggaactgaccctgaaagacgcttgctgcacaactgtcaacagacttccaactactgaggggcaatgctgctgcagtcagcgccaccaccagagtctgcctgcaggccaatcaggcaccgaggcctagggccatcctgtctggaagcgcgtggggcacagggaagcccgaacagggagtttctgctaagaaggtgggtgctgcgcaactgaaaacaaaactggttggacccactgatcaccaaaaaggcgctgtctcagtctctgcgcccgttgattttgtcaatcttagagacctcttccgaacacttccaaggaaggagctgatctgcacagataccaagagctgcccggaggcgccgacccggaggaggcggcacctcatcccgctgcccccgcgcacctcggtgctcgttctgtaggcgcaggcgctggttgtacaggctcttttcggtgaggtgctggatctccagtagcccctgcacgatttcgaacacagtgccgtcgagaagcgccagggccaggtcgctgagcgtggtgtaggacaggcgctgctggaaagagctgcgggtaggggggcgcggtgagccccggcgggaaacgaagccgcctccgcaggcctccgcccgccccgcctgcgtacctgggcaactccttcaccaggctctgtagcgccgacagcaactggt

SEQ ID NO: 94494 - DNA, 116102 bp, Homo sapiens
  misc_feature (1)...(116102): n = A,T,C or G
gttatgttaagcatatagcagccatttcacagagactggaacacaaagggtattcaacaaacacctgatgtgttagtaaccccaagaaagggttcttgggtcgcatgcaagaaagaatttgggatgaatccacaaagtaaagtgaaagcaagttcattagagaagtaaacaaacaaaagcatggctactcgccaggcgcggtggctcacgcctgtaatcccagcactttgtgagaccgaggcaggcggatcacgaggtcaggagatcgagaccatcctggctaacacaatgaaaccccgtctctactaaaaatacaaaaaattagcctggcatagtggcgggcgcctgtagtcccagctacttgggaggctgaggcaggagtatggcgtgaacctgggaaatggagcttgcagtgagccgagatcgcaccactgcactccagcctgggcgacagagcgagactccgtctcaaaaaataaaaaagaatggctactccataggcagagcagtggcatgggctgattggctcagtgtacttatggctatttcttgatcatatgctaaacaaggggtggatattcaatgagttttccaggaaaggagggggagttcctggaactgggggttcctcccctttttggaccatatagagtaacttctggacgttgctatggcatttgtaaactgtgatggtgctggtgggagtgtcttttagtgtgttaatgcattaaaattagtgtataatgatcagtgagtatgatcagaggtcacttttgtcaccatcttggttttggccaggttctttactgcatccttttaatcagcggggtctttgtgacctgcatcttgggccaaccttctgtctcattctgttactaagaatgcctatcctgggaatgcagcccagcaggtctcagcctcattttacccagcctctgttcaagacagagtcactctgcttggaatgcctctaacagatgcattgagctgaaatctgtgggggtagagggaaaaggagaaagggaaaagcaagatgggtttggtacaaagtccgccttgtctatttagctgattagtttttgtcatattaagtaaagttaaaatgctgaaaaagatcatcaaatttccaacatgaattgttctgtaaagcaaaatagaagataattaaaaattggcagggtgtcaccatttaatttcatccactgaatttaaataaccagtattttggccaggtgtggtggctccacctgtaatcctaacactgggaggctgaggcaggaggatcactcaggctcaggagttcaaggcaagcctgggcaaatagtgagaccttgtttttattttaaataataataaaaaataaccagtattttcaaattcatgtaatatggttaatactgtgctaagacataaagaggtacaggcaacccataggacatggcttcattctaaatggctttactatctagttaggagataatgctaacaaccaactaaggttgccaggcagtttatcaaatgtcatattgtgtgacgcagactttacagattatagatatctggaaatggggctagagaatcaatacttacttcattcattgaatattggttgagaacctattatgattctctgtgaataagagcgtatgttcggagtttgcaatctaatagagggagacaagggaaataactaatacagaataatttaagtggacaggcatggtggctcatgccagtaatcccagcactttgggaggttgaggctggcagatcgcttgagttcaggagtttgagaccagcctgggcaacacagcaaaacccgtttctaccaagggggaaaaaaaaagaacggattaagtgctaaaatagcaggatgctttgtagttgataaagggttattaccgtaacttctgaatgaaaggagtagtgggattgtgaatgattttaaagtaaaggctttaagactgagccttggaagagaagtaggatttttttttttttttgagacagagtcttgctctgtcacccaggctggagtgcagtggtgctatctcggcttactgcaacctccacctcccgggttcaagtgattctctgcctcagcctcctgaatatctaggattacaggcgtgtgccaccacgctcagctgttttgtgtttttggtagagacagggtttcaccatgttggccaggctggtcttgaactcctgacctcagctgatctgcctcccaaagtgctagggattacaggtgtgagccaccgcacccagctgaaaagtaggactttgaaaatgttgattaagtcaaactctgtaaaatatttgaagacatttattttgagccaaatgtgagtgaccaatggcccatgacacagccccaggagatcctgagaacatatgcccaaggtggtcaggcagttagcagaaaggggtactgattcagaccccaggagagacttcttggatttcgcaaaataaagaattcgggtgagtccatagagtaaagtgaaagcaagtttattaagaaagtaaaggaataaagaatggctactcatgggcagagcagcggcttaggctgctcactgattacacttatagttatttcctgattatatgcgaaataaggggtggattattcatgagtgttccgggaaaggggtgggcaattcctggaactgagggttcttcccctttttagaccatatagggtaacttcctgatgttgccatggcatttgtaaactgtcacggtgctggtgggtgtgtcttttagcatgctaatgcattataattagcaaataatgagcagtgaggatgaccagaggtcacttttggcaccatcttggttttgttgggatttggctggcttctttaccacatgctgttttatcagcaaggtctttgtgacctgtatcttgtgccgatctcctatctcatcctgtgactaagaatgcctaacctcctggggatgcagcccaataggtctcagcctcattttacccagtcctattcaagatggagttgctctggctcaaatgcctctgacaaggctacagtgtagttttatatactttaggaagacctaagacattcatcaaaacatgtaagatgtacattggcttggtcttgaaaggcgggacacctggaagcggagacttcagggtcacaggcaattcaaagattatcaggctggcgtggtggctcacgcctgtaatcctagtgctttggaaggctgaggtgagaggatcgccttaggccaagagttccagagcagcctgggcaacatacggagactctacctctatattaggaaataaacaaacaaaaaagacttaagttattatctaaagacctggagtcaatagaatgtctgggttaagatatggggttgtggacaccaaggttgtttttttgagacagagttttgctcttgtcgcccaggctggagtgcaatagtgtgatctcgactcactggaacctccacctcccaggttcaagtgatcctcctgcctcagcctcccgagaagctgggattacaggcacccgccaccatgcctggctttttttttttttttttgtaattttagtagagacaaggttttagtcaccatgttgtccaggctggtcacgaactcttgacctcaggtgatctgcctgcctcggcctcccaaagtgctaggattacaggcgtgagccaccacacctggcccaagacctaggttttttttttttttgagacagagtttcattcttgttgcccaggctggagtgcagtggtatgatcttggctcaccgcaacctctgcctcctgggttgaagcaattctcctgccccagcctcccaagtagctaggattacaggcatggaccaccacgtctggctaattttgtatttttagtagagacgggggtttctccaggttggtcaggttagtctcgaactcctgacctcaggtgatccacctgccttggtctcccaaagtgctgtggttacaggcgtgagccactgtccctggcagagatcaaggttttattatgcagatgaagcctctggtagagctcttatcagacctaaaaaggtgccagacttggttaattccctcctgggtaagggaaaacacctggaaaggaacagggcttttctacagactgtaggttttcccccacaagatacagctttgcagggccatttaaaaatatgtcaaaggaatatattttggggttaaataattcaatttccttcagggcctgctatctgtcgtgatgctatactagagtcaggctggcttggtgtcaaaaataaagttctagaaaagctagaaaaagtctggcagtcttaagatctgttttcatgtgaatgctgttcagctcagcctgaattccaaagggaggagggtataatgagccatgtccgacccacccccggactaacccccccatccccacttccatctagatgatggaataactagattttcaggtttactttggaatgcccttggccaagaggtgaggggcagggggtccatcagtcagttgtggggtttataattttatttttggtttacaaaaggatagaatatttcaggttgaagcataggcaagagcactgcagacatgaaagggcataattttaggagaatgctcacatggaataaagaatgtcttgaagggtataccgtacattattattggtgttataacaagttatcacaaacttaagacacagattatttcacagttctgttggtcagaagtccaacattgatcacatgaggataaaatcaaggtgtcatcagagcattagagaggcttcaggggaatgtttccttaccagttccagcttctggaggtcacccacaatgctggaggctcccttcctctatattcaaagccaacaatgttgtatctctctaatcattcttcatagttacttgtcactcttgactctcttttgcagttttggaggccctatgattacaatcagcccactggaacaatccaggataatgttttttttttaagatggaatctcgccctgtcgcccaggctggagtgcagtggagctgctcagctcactgcaacctctgcctccctggttaaagcgattccaggataatctatttcaacaccaggtaattaacaaccttaattcccatttgctatgcaagctaacatattcacagcttctggtgttcaggctgtggacatctttgaggggctagtattctgcctaccagagttaataagaaggagctaatactaagaggaaaagaggcccaaagaggaaagtgtgtgaatgcactgataaaggcaatggggaaccagtgcaagtttctgagtcttgcaaattcttatttttttgaaataagctttggttgcagctgagaaaactgaacaggcataattggggagcaacattaggaggccaccattacagttgagatgagagggtataagctagagatggcagagctaaatcgttttctttggtccaaagctgcctatgcccttttctaagtgttttccaacagaattcatgagatcattccacaggatctcagcaagtgcagtttctgataacttggccgaatttgttcagtagctgctgcaacggagggcttaaatctttcatctacacttaacaaggggagcccggaaaagtggcaaaaccctagttagcaaggctgaggctcgcagagacctaggcatcgaattttttaatggtccaaatcgcagggaaagcgagcactccctgttctgaaggttttccctaaacacggagacaacactaaaaagctgtgccgcgtgagggctgaaagtcctgttttctccctagcttcagtgaagaaagcctgacggctcccccgcgtccaacaaagacaacgctcttccggtcttcgtgacccaccccgtgagcagcccaaaccgaccaccgtcctcccccagctcccaccaatcggatcgcagggactcgagccccacactgctgagtccgctgacactgcgtccggggccagacgacgatatcagcgcggggtccccacaacgccatggggcagagccaactctcgagcgcgtgatcgaagccygcagttttttcgccyccgtcacttccgggtgcgacaatctcttctgtccggccagccgctggagtcgttaggtgcckccttgcttctgacgagccacacgtttgcttcttccctgtgttcccagctggagggacatgagtgtccctgggccgtcgtctccggacggggccctgacacggccaccctactgcctggaggccggggagccgacgcctggtacgtactatcgggtgggaagcgcggcccgggctgggtgtgaggggcggggacctgagtgagtagaactccggagaaaccctgggggagtaagcggtttttggcggctgcggcccccgggccctgccccgagtgcagaaatggggaaccgcgccggcccctctgcccagcgcaatgggcggaactgaagtcccgaggggaagctttgtattgggggtgcaattgaaggcggttgatggtgaagccattctgagtttatgtgttgactccggtacgtcattggttatttgtcatacggcagtggtgggggatggatttaccagaaagatgatcagcttataattcagagaggtgacgtatcctataatattgaccactcatgaaatgcttggtcagctcggtgatattacttcatccctattcctgcagcagtcttctcgaccgagttccaggagggatttaagctctaatgccctaaggcatccattgaatggaatgaattaacttgctgtgcacccaaaatggtactatttatgtaccatccttgggagaactgagaaaatggtcactcagagcattttctgtgttctgtgktttagatgaggccttagatgagaaaggctgcagggctccttggatatgckttttcttktacctcctgtttcagaaatataggggttacccccaaatagtgctctcagcactttcctgttcatgcttttcctcaaggatctcttcacactttcattaagtcgcttctataaatatgacttcyttgtatgtatttgaaacttgggcccctctcttaactcttgtttacttctccatctgctagctggatactttgacgtggctgttttgcactaatctcacgtaaggcatgtacataaatgaaaacatgtctcatcctgttaatggtggtaggtcactctgacttgaaactttgaaattgctctggactttttcctctctctctccttccacctctaggggattctcctatacaattccatctccttgtaatttcacctttaaaacagctgttgaaaggctggttcacctccagtcttactctttcaacgcatctgtcccgctgctgtcacatcactgtcccaagataaagcttcagtcatgtcattcctgaactcagaaaccttaaatagctcctcactacttattaacaaaggtccaaaccattaacttggcatttagaggcccttactggccttccggtcttaaagctcactattgctatgctgcatatgccccatgcctctccagaagtatcctgtactgtattccagcctttcctcatgctgctttctttacccatattgcatccattccactcctgccatagatttcttccccatttggaaatagtcctcacagattgttggtgggagtggaaattggtgccaatttcttaggagggcagtttggcaatgtctgtttaaaaaatgcataaactctttgtcccaacagtctacttctaagaatttatcctacagaaagtgacacaaatatgcagataagcaaggaagctcactgcagcattgtctgaaatagcaaaaagtgaaaataacctaaataatccatctatgggggactggttaaacaaactatggtagaattctattctgctaaaaataatgtagtagatccctatatgttggtatggaaagatacctaagatatatgttttaaaagttgcagaatggtatgagtaatatttcgtttgtcataaaaataatatatgcatagatacgcaaagacaatttctggaaggctctgtgagaaactccagagtagctcatgctggagttagagggtaagaagaagtatttttacttttcagtttgtgcctccctctgtagtgttttaagtttttacagtgagtaacactcgaatagacaaagagaaatgaaaactccatccattctttgagccttagctcagtgtccacacttcctttaggaatttttcttagacttccctaatgaaagtcgctctcccctgaatttccataacattttctgtttctcattttctgtgattcctcacttctcatattctgtgattgctcgtattgtgcccttccagggaaggagacttgccttatttattgttgtaatctcagaacctggtacataatatagatgttcagcaaacctttctcgtatgaatagaataaggaccctccctttcttcttctttactctcgcacaataaagcaccttgaacttagtaattaaatatatataaaaacttgagtgacttcttaaccattggaagcagagggtaaaagagagaaaaacaaaacaaacaaacaaacaaaaaatgagtaactgagactcatccaataattaaccagaacattggggtgggaggagggtttgtgagttaaaatgtatgtatatattgttaagcgaagtgaattagttgttattccttaaagttgaaatgcccttttttggggtgttcctatcataaaacattaagaaaattgttttctatatttattaatacttaaagttgctgattgcattgttattttaatcaagccttaagcaacggcataattggtggatataatttattcacttcctatacagttggtacattaatatccctaagtgcttcacttttctctctctctctctctctctatattttttctttttttggtttttgtatttttattttatatgtggagtgcttcagtttctagttagctcttacctatttgaatgttgccttgcaactttgagaagtccaaagtttgttcatgtgtttcgtagggttaaaataaaaattatataattttattttgattttcaaaaagcttacttcgaatatgatagcatgttgttttcctcaatctttttttttttttttttgaggcagagtcttgctctgtcgcccaggctggagtgtagtggcacaatcttggcacactgcagcctccacctcccaagttcaagcaattcttgtgtcttagcttctcgagtagctgagcttacaggcatacaacactacgcccgggaaatttttatatttttagttgagatggagtttcaccatgttggccagactggtctcaaactcctgacctcaagtgatccgcccacctcagcctcccagagtgctgggattacaggcatgagccactgtgccaagactgtttttctcaattttgccaaaatttaaatctgtggcacaaattgtacttagaaatgtgtcacaagcaatgtgttgtgataactgttctatagagtgatgtaatttgatgttactgatggttaccagactataattgaagagagatgtttcagagtttaatattaatcataattttagtgtataattttagtaaagtgaccatcttacttttttttctctgattataaatcagtgattccatcttacaaaccattaaaccctatttagaaattgtatttttcttggtaggaatggtgattgatattcatcttagatgtttttgaatacctggcacaatgcttacacttttattattcaaaggaaagtgatgaggcattgatctcagcatcaggtctagatttatacacaagacaatgattatacactattttctatggtaaattaagttgctgaatcttaagagagaagaaattcttagaaaatccctcttctcctccctaacaaataacacaaccctccttttacatgtaaataacatatcgaactatatcaaaatcgatgttgacctacatttttgtttccatagaattgaaaacatactttattttaggcattgcatttttgtttatataatttcttcatgcttttgaaagcaagaatgctttagttcagtgaccgttacccacgttttggcctcaggctcctttattttatttttatttttatatytatttatttttttgagacagggtctcgctccgctgcccaggctggagtgcagtggtgcgatcatagctcgctgcagccatgaacttctgggctcaagttatcctcccacctcagcctcctgaatagctgggaccacaggtgtgtgccaccgtgcccagccattctgggcttgagcaattctcccaccttggcttcccaaagtgctaggrttacaggtgtgagccactgcccctggccctcagactcctttgataatccagtgaaaactataagtcctctgccctgaaaaatatataaagatacagaattttgtgtatgttaatgttcatttatcatagactttaccttatagtagtaacttaaaaacattttttgaacattcatgactcattttttagaggaagctcagaggtaaaagtttaaaaagaaaagaaggatacctgtggttgggagactgtgtgtgtgccctcaaccccatttgtgggctcctttctacctgctactccccaacctccttttattagctgtgtcaatttgaaaggttccggctggtcagagtgcagtggtgtttacaactaattgatcacaaccagttacagatttctttgttccttctctaatcccactgcttcagttgaccagcctaaaaaaawaaaataaataaaaggttcctaaatttgatttttgctggggacaggtttaagtgacacttctccagatgaagggttaatagaggacttgactatagaagacaaagcagtggagcaactggcagaaggattgctttctcattatttgccagatctgcagagatcaaaacaagccctccaggaactcacgtaagctaataaaaaaccagatatacactcatttcctctgtggcataktcayaatttgtataattgtatactgtgttaagacataatattttttaacatgcaattataattgagtatgtctatatctttattgatagcagatgggaatagaggagtacatagtattctaaatgtaaaaagtgaaatgaatactcctagggtgttygatctcttctaagaagtactcctaaatcttacctagaatctgtgattaggtttggcatttatcattattttatgaaagtattgcctattggggattgttcaggtggagatacacctgtttctgagtagagttgaaaaattgcctccataaaagtcacgcttgttttcagttgctrgttcaaataagttgccagagatctgtaagtatcttttctgagatgatctgtttcattcccagtagataactttactagtaagtaaagattagaggatatgttaagaaaacagtttaagatagaacagaacccatagagtgggatcagtatacaaaaacatatactctggctttatcagctcccatccacagacaacacactcagcttctgcctcctcctgggtcgggacctctctggatagcccaggctggcctgtctgtcatttctttctgtggtggtcagctttacactggctataaactgctgctgctctgagacctaccctttgaaaacttacttaagaggcctttattagggcaaaaggagaggaataataactgtgcttattttataattataagtaatgttataatccttagtgttaaggtgctaaatgcatataaaagtggtactgaggccaagtgtggtggcttacacctgtaatcccagcactttgggaggctgaggcgggcggatcacttgaggtcgggagttttagaccaccctggcgaaaccctgtctctactaaaaacacaaaaaattagctgggcgtggtggtgtgcacctgtagccccagctacttgggaggctgaggcaggagaatcgctygaactcagggggctgtttgtggtgagctgagatctgcaccactgcactccagcccaggtgacagagtgagactctgtctccgaaaaaaaaaaaaaaaaaaaaaagtggtactgggttattctaagactacatgtgtactactatagttagggagttggcaaccttctcagttttgtgctaatcccaaacaagattttttttatccctagcgcgcgatataccttatattttgatgccaatcaatctttgttgttgtatgaggtgtgatagatggaaggtaagaaactgcaagcgaacatatctgaaaaatactttacttgcaggaagctgggaatcaagttttaattgcagagtttaattgatgatgatattgtctaaaatttagtgtttcgaatagcccctacttatcttcttaggcacccagacaacaatgattattttgacgatgatagtaaaattagctactgtttgttattatatgtactatatgcccagcactttaacatatctcagttactcctgacaccaactttatgaagtatctagtattatccttatttacaattgaggaaactgaggctcagagaggttaagtaatttgaaaaagattacacaggtagtagtagaattagctattgaatatgatgcattagtagttaatatgcttcttgactgttaaggaaaggtaaacaaatttcagagaaaggaaaaagagagtatttcctcctcttttccccatctctccacaaatttcactattaataaagatataggggaaagagtactggactgagagccacctggattctagtcctggctctgccatcaaacctttggtaaagcctcttcaccattatagaaacaggtccacagagaagtaaaggagaaggtagtggtaggtagggattaagtttattttgtagctaacaatgagtaaggaagaccaagaaaaaaatttagctttatatataagaaaggttataaatattcatttatatgtatttatcattttaagaacattggaaactaaaaaaacaaggttctgggatccaggcccctaaagcagccacagaggtgcagttgtcagtggcctccatggagctcccttcgagataattcacacttggaacttgtaaggaagtagcttttctctcagataatcattcctcagacactgcattaaggcttcacaaacattgtcagcatatttactgtaaattatacaaagcttcaagggaatgaagttgagtcatcttttctgccccactgtattctctggaactttctccctttttttgagactgagtctcattctgtcatccaggttggagtgcagtggtgggatctcggctcactgcaacctctgcctcctgggttcaagagattctcctgcctcagcctcccaagtagatgggattacaagcgcgcaccactccgcccagctaatttttttgtatttttagtagagatgggtttcaccatgttggccaggctggttttgaactcctgacctcaagtgatctgcccaccttggcctcccagagtcctagggttacaggtgtgagccactgtgcccagccacattctctggaaccttctttgagagtggccagacttatgggtcaggaaagcactgtacttaaaattatagttgtattataaagggtacagatcaggacaagccaatgcagagacacacagggtagtgcctgggaggttcctgaacacaaaacttttgtttcctctcccagtgagaggaaacccccgctgccagcacatcagtgtgttcagcagcttggtgttcgaggctgcagtgaaccatggtcatgccactgtgccctagcctgggtgacagagtgagaccctatctcaacaacaaaaatttagtcttttaatctatgtacttggaatgtctctattatttagaagttctttctttgttatttttcattagcctcccatcttgaagctctaggggcccatcatgagtcactttattagtgtaaactcaggtgtgatccaaggagctcatggataacaaagacacttctgtcacttggaaaattccaaggattttagaagctctgtgccagaaacctgggacaaagatcagacaaattctttgttagataacaggtgtctgttcagatcttttgctcattttaaaattggattgtttttcttattgttgagttttaagagttctttgtatatttttgatatgagtcctttatgtgttttgcaaatattttctccaagactgtggtttgtcttattactctctttacagtgtcttttgcagagcaggagtttttaattttaataaatttatttaataaataagaaaaaatatagtcggttttttcttttatgaattgtgcttttggtagtgtgtctaaaaactcatcaccaaaccaaggtcacctagattttctcctgtgttttcttctagaagttctagttttgcattttacatttagacctatgatttattttgagttaattttgtttgtttgttttgagatggagtttctctcctgttgcccaggctgtagtgcaatggcacgatctcggctcaccacaacgtctgcctcctgggttcaagcgattctcctgactcagcctcctgagtagctgggattacaggcatgcaccaccacgcctgtctaatttttgtacttttagtagagccggggtttctccatgttggtcaggctggtctcagacctcaggtgatccgcctgcctcggcctcccaaagtgctgggattagaggtgtgagccaccacgcccggcctattctgagttaatttttgtggaggcttgtaaggtctgtgtctattaatagatgcatttctttgcgcatggatatccagttgcttcagcaccatttattgttgttgttgttgtttgagacagggtctcactctgttgcccaggctggagtgcagtggcgcagccttagctcactgcagcctccatttcctgggctcaagtgatccttccatctcggcctcccaagtagctgggaccacaggcgcacaccaccacacctggctgatttttgtattttttgtagagatggggtttcaccatattgccctggctggtcttgaattcctaggctcaagtgatcctcctgccttggcctcccaaagtgctgggattacaggtgtgagccactgtacctggccaccatttgttgaaaaaactatcctttctccactgcattacctttgcacctttgtcaaagagaagtttattgtttttgtgtaggtttatttaataagggttttctattctgttccattgatcagtatgtctgttcttttgccattaccatgctgtcttgatttctgtagctttttgttgttgtcattgtttgttttttttttgagacagggtctcactgttgcccaggctggaatgcagtggggcgatctcagctcactgcaacctctgcctctcaggttcgtgattcttgcacctcagcctcccaagtagcgggattataggtgcgcgccaccacacccagctaatttttgtattttttatagagatggggtttcaccatgttggccaggctgatcttgaacttctgacctcaggtgatccccagcctyaggctcccaaagtgctgggattacaggagtgagtcactgtgcctggccagatttctgtagctttataataagtattgaaattgggtactgtgagtcttccaattttgttcttcaatgttgtattggctcttctatgtctttgcctttccatatgaactttaaaacagtttgttgatatctatacgataacttgctgggattttgattggggttgcattgaatccttagatcaagttggaaataatttgcatcttaaaaaatattgaagggctgggtgtggtggttgatgctggtaatccaagcactttgggagcctggggcagaaggatctcttgaggccaggagttggagaccagcctgggtaatgtaatgagaccctgtctctacaaaaaaatttaaaaagtcagcctggcgtggtggtgtgcacctgtagtcatagctacttgggaggctgaggcaggggatcccttgaaccaggagttcaaggctgcagtgaactatgatcatgccgctgcagtccagcttgggtgacaaagtgagaccctatctgaacaacaacagttgagtcttttaatctgtgtacttggagtatctctctattatttagattttctttgatatttttcattagagttttatactttttgcatatagctcctgtatatattttgttatatttgtaccaccatatttcactggggatggggagctactataaatggtattgttttttaaatttcaaattcattgctggtacataggaaagaaattgacttctgtatattaaccttgtatcctgaaatcttactatacttgcctattagtttcaggaggtttcttgttgaatctttgggaatttccacataggaaatcatctgggaacaaagacagtattattgctttcttctcaatttgtataccttttatttctttttcttgtcttgctgtattagcttggacttaaagtatgatgttgaatatccttgatgaacattgatgcaaaaatcctcaataaaatactggcaaaccgaatccagcagcacatcaaaaagcttatccaccatgatcaagtaggcttcatccctgggatgcaaggctggttcaatatacgcaaatcaataaatgtaatccagcatataaacagagccaaagacaaaaaccacatgattatctcaatagatgcaaaaagcctttgacaaaattcaacaacccttcatgctaaaaactctcaataaattaggtattgatgggacgtatttcaaaataatagctatctatgacaaacccacagccaatatcatactgaatgggcaaaaactggaagcattccctttgaaaactggcacaagacagggatgccctctctcaccgctcctattcaacatagtgttggaagttctggccagggcaatcaggcaggagaaggaaataaagggtattcaattaggaaaagaggaagtcaaattgtccctgtttgcagacgacatgattgtttatctagaaaaccccatcgtctcagcccaaaatctccttaagctgataagcaacttcagcaaagtctcaggatacaaaatcaatgtacaaaaatcacaagcattcttatacaccaacaacagacaaacagagagccaaatcatgagtgaactcccattcacaattgcttcaaagagaataaaatacctaggaatccaacttacaagggatgtgaaggacctcttcaaggagaactacaaaccactgctcaaggaaataaaagaggatacaaacaaatggaagaacattccatgctcatgggtaggaagaatcaatatcatgaaaatggccatactgcccaaggtaatttacagattcaatgccatccccatcaagctaccaatgactttcttcacagaattggaaaaaactactttaaagttcatatggaaccaaaaaagagcctgcatcgccaagtcaatcctaagccaaaagaacaaagctggaggcatcacactacctgacttcaaactatactacaaggctacagtaaccaaaacagcatggtactggtaccaaaacagagatataaatcaatggaacagaacagagccctcagaaataatgccgcatatctacaactatctgatctttgacaaacctgagaaaaacaagcaatggggaaaggattccctatttaataaatggtgctgggaaaactggctagccatatgtagaaagctgaaactggatcccttccttacaccttatacaaaaatcaattcaagatggattaaagatttaaacgttagacctaaaaccataaaaaccctagaagaaaacctaggcattaccattcaggacataggcatgggcaaggacttcatgtccaaaacaccaaaagcaatggcaacaaaagccaaaattgacaaatgggatctaattaaactaaagagcttctgcacagcaaaagaaactaccatcagagtgaacaggcaacctacaacatgggagaaaattttcgcaacctactcatctgacaaagggctaatacccagaatctacaatgaactcaaacaaatttacaagaaaaaaacaaccccatcaaaaagtgggcgaaggacatgaacagacacttctcaaaagaagacatttatgcagccaaaaaacacatgaaaaaatgctcatcatcactggccatcagagaaatgcaaatcaaaaccactatgagatatcatctcacaccagttagaatggcaatcattaaaaagtcaggaaacaacaggtgctggagaggatgtggagaaataggaacacttttacactgttggtgggactgtaaactagttcaaccattgtggaagtcagtgtggcgattcctcagggatctagaactagaaataccatttgacccagccatcccattactgggtatatacccaaatgactataaatcatgctgctataaagacacatgcacatgtatgtttattgcagcattattcacaatagcaaagacttggaaccaacccaaatgtccaacaatgatagactggattaagaaaatatggcacatatacaccatggaatactatgcagccataaaaaatgatgagttcctgtcctttgtagggacatggatgaaattggaaatcatcattctcagtaaactatcgcaagaacaaaaaaccaaacaccgcatattctcactcataggtgggaattgaacaatgagatcacatggacacaggaaggggaatatcacactctggggactgtggtggggtggggggaggggggagggatagcattgggagatatacctaatgctagatgacgagttagtgggtgcagtgcaccagccatggcacatgtatacatacgtaactaacctgcacaatgtgcacatgtaccctaaaacttaaagtataataaaaaaaaaaagtatgatgttgaataggagttgtgagaggggacatagcttgttctagttttaggagaaaattatgtagtttctcaccctaaatgttagctgcaggtttttcaaggtattccttattaagttgaggaagatcctctctcttcctagtttgttgatggtttatagtcatgaatagatgctggattttgtcaaatgctttttctacatcaattgataggaccatgtaatttttcttctttagcctgttgatgtggtagattacattgattgaatttttgaatattgaaccagctttgcgtatttggcagaaattttacttggttgtggtatgtaattctttttacacattgttggattcaatttgctaatattttgttgaggagttttatatcgatgttcatgagagatactggtctatagtttttctttcttgtaatatctttatctggtttggctttagggtaatgctagcctcatagaatgagttgggaggtgctccttttgcttctgcagttgttgccctttatccaaaggaggatatgttccaagacccctagtggatacaatattttaaataattttgtgcatgaaacaaagagttttgactgtgacttatcacatgaggtcaggtgggtcattcattgtccaaatgtttcaggttttgcaacattttggattttcaggttatggatgtcagcctttatacactatgttttttcctatacttacatacctatgataaagtttaatttataagttaggcatagtaagagattaacaacaataactaataataaaatacagcagttatactataataaaagttaagtgaatgtggtctctctttcaaaatatcttattgtgctgtacttacccttcttgtgatgatatagcacagctgcagttgactgtacgtgcctaaaactgaagaaagcaaaactgcagataaaggaggactgacatattttctggaagagactgtggggaattggtatcacgtcttccttaaatgtttggtaaaaattaccagtgaagccgtttggtcccggtactgtcttttttggaaggttattacttactgattcaatttgtctaataaatataggcctacataaactttttgtttctccttgtataagttttggtagtttgtatctttcaaagaattagtccattccatccacattatcaaatttatgagcactgagttgttgaaaatattcatttattatccttttaatgtcatgggatcagtggtgattactgctctttcatgaataatactaatactttggggtttttttttcttgattggtctcactagaggtttatcaattttattgatcttttaaagaaccacctttttgtctcattgatttttttgttttcccccttctattgttttctagttctaacagcctatttttgctgtcctgtgtatctcagatggttgacttgctgggttttcctctcatccattctgtatttcactttctgtgatctctagtccaagctggagggacaaagttatttatttatttatttatttatatttgtagagatggggtctcaccctgtcacataggctgtagtacagtggtgtgattataactcactgcagtttctaactcctgggctcaagcaatccttctgcctcagcctcccaagtagctcggaccacaggtgtgtgccaccacacccagctcattttttgtgtgtgtgtgtgttttttttgtttttgtagagggtcttgctttgttgtccacgctggtcttgaattcctggcttcaagcaatcctccttccttggcctctcaaagtgctgggattataggcatgaaccactgtgcccagccaagagacaaatttatgacctgtagggtatgccagactcagtgctggatagtagagatgttgtaattgccctgagcctgttcgttgttatttcttttttttttttatcattattctctagatagcacagttttacaagcaaatgacatatttttctttgtagcattctttaaaatattcaggtaggtgacccttttaatgtcacttattcctgtgatcctaacattgattgatgtgtaaagaaatatcaaggaagttggcttctcttcctcaatgagttttgaattagaattgtaatgagaaacattagaaattatctggtctgatcttctcactttgtaaatgaggagatttaggccagagaaataaactgaatttctaagatcatatagctaactggctgttggccggggaaagctatgatttccagtcctgtgcttttttcatcttactgcttaattattctttttgacttactatcccttgatacttcatcttcctcacctctaatctgaaaaaccattgttcctcatttcctttatgggaatgttgcaattttaagatatataaaacattgaacttcttgggcaaaatactataaaaaacttcttttttggaataatacagagagttgttaaaagtaacaagtaataaaatacttttaaatgattggattattttagttattagaaattgaagcaagaataaaagacacatttagttatcagaatgtggctttagaatattattttgaaaaatcttattctatattaaataaaccttagagagttaatacatttcctacttaactaactgttaccattaaccaagatgaatatgattccttttaatggaccggcactttaaatatgtagagtttgtcttggctgtgtgtttttgtttcagacagaaccaagttgtattgttagacacactggaacaagagatttcaaaatttaaagaatgtcattctatgttggatattaatgctttggtaagtatgatttagttgatgtaatttaatgacatcttgtcttagcaatagctaagacttagctaagcaatagctaagattttaagcttagaatttgtctttttaacaagaaaccttgattgaacttctgttgtgttgaattgttatctttcaaatgttgaatttatagtaggaaatttaacttatttgtgcatttggaatagatctgcttataattgaagacttagaaaagagaacttagacttggcatagtggctcatacctgtaatcccagcactttgggaggctgaggcaggaggattgcttgagcctagcagttcaagaccagcctgggctacatagtgagaacccatctctacaaaaagtaatttagaaaaatagttgggcatggtggcacatgcctgtagtcccagcttttccagaaactgaggtggaaggattgcttgagcccaggaggtcgaggccacaagtgagctgtgattgtgccactgtactccagcctgggtgacaaagggagaccctgtctcaaaaaacaaacaaacaaaaagagcgaactggaagtaatgaacctttggggtaccattttttttttctttaaagaaagtgcatttctctttaccaattacatggtttcttaaattagcattttatttaattatatggcatattcataatgctataataaattaatgctataggctgaagtggacgctttgagaatgatcagttatatctttcaatataaatagttgaacagttgaatttcatcagaagttctatagctttttgatgagaggaagtgatactctgtattataagaaacaaggaattaaccaaaaaaaggaacttgttttgctacctttattttctgatgaacattaaaaatagttttgtttgtgggcagggcacagtgacttatgactgtaatcccagcactttgggaggctgaggtaggaggattacttgaggcgtgcagtttaagaccaacctggccaacgtagcaagaccccatctctattaagaaaaaaagaagctgggtttacatgactgtagccattcatgcatacctcaaaaaaatggacttttctttggacaaagatggtttactaatgttttccatttgtaacaattaaaaacaaagttcatattctctggcattagaggcctgtggaagtaaatacagagccatctgcccagtagttcctggtttcttgcgagggaggtgggcaaggctacactgacctatttttgtgttccccactgaaatcctgttgcaacagaaggaatatttgttgaatgaatgaatgttgaatgaattaaccaagcagatgtaatactgttgctttagtctgaaggggcaggatggagtcttcctcttttttcttctcttagtcaagagtagtttttattatcatctgggaactgaaaactggaaggcccaggatatgtaaaaaggcactgtaacttctgagctaatcagacaatgactttacttgcagctacattaaggctgtgaatctctctactgacatttctttcatttcttctctttctgtaaccttgtctgaaaatagggtgcttttctccttctctctgacatctctaggcttgcatcatcctcccatcttctcctgacataagacttcattttagattatgcaggttggctgagttgtaaagtctgtacttaagactcctcaagaaggaaagtgtcctcacagagatcattctgcttagtctgactaaagcagcccaaggaatggattaaacttgtccacagtcctttctgtccagggctctgtggccacagtttgggttttccttatgggcagacacttcacttaaactgtttcatgtgctctggctcagtctgtctcttgtaaaggcagagagaatgttttacttttcttaaatgaaactgatagcattattagatagtcttatctgaaattttagaattatatgtttttaaagcaaaatattgtctatgcccatcttaatataaatgtctattttatgtttagtaacacttttgtcaatctgaactaaatcaaatgtctttcaaatcctactaacaatataaggaaatctttattttggaattaaaatgtgaagataaggctgtaaaaattttgaccaatttaggaagcacaaactatcatttatatattgccttatttattcattttgatattttagtctattttaacttgacttttcatttatttttccatgttaagtttgctgaggctaaacactatcatgccaagttggtgaatataagaaaagagatgctgatgcttcatgaaaaaacatcaaagttaaaagtgagttgaaaattctttcacattctttacaaaagtagaggtttaattgttttttgttgttttttttttttttcagtattctttttttttttgagacggagttttgctcttgccgcccaggctggagtgcaatggtgcaatctcggctcactgcaacctctgcctccggggttgaagcgattcttctgcctcagctccccaggtagctgggattacaggtgcccgccaccacacccacctaatttttgtatttttagtagagacagcgttctaccatgttggccaggctggtctcaaactcctgacctcaggtgatacgcctgccttggcctcccaaagtgctgagattacaggcgtgagccactgtgcccggccagtattcatattttgacttttataccctcatatacaatagcataattcattcatggtacattgttttctttttaaaaatgtcattgtttaagaaatattagagacagggtctcactacgtttccgaggctggtcttaaactcctgagctcaagcagccctctggcctcgacctccctaagtgctgggattacagacatgagccactgcgtgcagccttaaaaatatcatttttttttcaactgcactctgagcatttttactaatagctgggctgataggcttagattctctggatatgccctacagttctcatttaataagagtttagagcaacaaatttttttgaatcaaagggaccttaaattatcccaaatttaaatgtccaagatgaagtttattagtgtgaatgrattacctcaaagcagagcactgttattttcaaattargctaaacctgtaacccctgattgctctcttggtttttaaattttttttttaacacagaaaagagcacttaaactgcagcagaagaggcaaaaagaagagttggaaagggagcagcaacgagagaaggagtttgaaagagaaaagcagttaactgccagaccagccaaaaggatgtgaaaagttgtgtttgtgtgttttcttctcctgtcccatatttgggttatgatgactcaagtgtagactgaagttgaggtagtgccttatgccattatgtcatatgttgaaatccttattccggtattactgtgtctccatgccttttttccaagtagcagacgtcatgttgcatggtttttgatatttatatgtaagtttttcaaattttgcttaattttaaaatttattattttgatcttgaattatttataaactggaaagtggtttgattattgtgagtcaaaactctaagtggttaaaaattagtatgaattttttagcttcttaatgaatatggatttaaaactctccagttcttattttatgaaatgacttgcctttctggtaatacaatgctgattttttagtaattgccttttcattactttgttaagaagaaatgccagctgtttaatcacacctacccctggaaaagaggtaaaccttttgaacagttgaatttcatcagaagctctatagctttttggtgagaggaagtgatactctttattacaagaaacaaggaattaacaaaaataaggaacttgttgctacctttcttttctgttgaacattaaaaataatttggtttgtggactgggcatggtggcttatggaaaagaggtgagcctttgtgaagaacataatggaaaagtgcatgtacgggaaataacagcactttaggtgtagttcaggtgagcaagatgccagatagtttctactaaccatatactctttctgcttcttagcgtcgttgtcactgcttctgtggcttttgggttcaaagtagattatatatattcctaaagcttggtggaggtagtggagctatcacacactcaaatgagcttgtatatttataatacaatatagtattatagtaacagttatcatacactgagatatagtttctgtgcttgtaaaaaattcttgaagtgaggccgggtgcggtggctcatgcctgtaatcccaacgctttgggacgccgaggcgggtggatcatgaggtcaaaagattgagaccatcctggccaacatggtgaaaccccgtctctactagaaatacaaaaattagctgggtgtgggggcgtgcgcctgtagtcccagctacttgggaggctgaggcaggagaattgcttgaacccaggaggcagaggttgcagtaagccaagatcgtgccactgcactccagccttggtgacagagcaagactccgtctccaaaaaaaagaaaaaaaaatttcttgaagtggaatgatgtacaccaaatacccactttatagataattacagggatggtgaaaaattagtaaatagcttcacaaaagaggcagcgtgatacctttagtgttttctagaatttttttctggatattatatgtaagaatttattgtttgagggaaatacgaggtttcattgtttaaaatcaagagtgtattgtttactgttttacagtattatttaatatccaactggtctccaatctccattacatagggactgtacagagcctgtgaagatgtatgaatggtatcttttataatccacaatacatttctggtaagatggaatcactacctctgatcacatatcaggctaacgatagagaaagcattaggtttaagttgagggctaagaactggtttgtttaaaggtttaaattgttggaaaagagcatttgccttctttaatgaatgatggtctcacaattcagttgactttgacctaatatttaagaatataaatatattttatttgaaaggctgagtgttgccctcaaacacttgctaaaactgcctagggcaggattcattagggcttgcagacaatgtcacctaaattgctgaatgtactcattataatatgatatctgacaaaggtagtacagcgtttctgagtcatttgggaccaactgcagtggttgtttaaaatgctggttcctgcacacaattctctatctactgaagcacatctgttttctttgtttgttttgctttgctttttgtttttaaagtttcccccagtgattccagtgcacctgaaaagttgagaaccacaggcttagtggtacgttggggtttcccacgctaggctgcatagcattataacctgggaacgttaaaaaaaatacagacattcttgattcttagtgtagttatgatgtggatcctacgtattttttaaaaaactctccagataattttgatgtcacgagtcactagtatagactatctatctagtgagttgtattataagcgatgaaatactttaaaagctacccagtaactcttgggattaattttatgaaataaattctgagctgctgcttttgatatagtcagacttaagactgaaccccagtagayaggcaatagatatagaattctggttagctaattgaacttttgtgacctgtttaaaaacaaatcaaatttattgaacaaatgacaaggcacaaatactttcagaattgtatttcagttttgaagatttaaaaaaaatgtgaaaataaatatatattagtatcctttattttaaagtcaattgtaaaccagaagtactgttattttggtgattaaaatccaaaactttagctgtatttcagtaacaaaaacataccttactagactgtgatggctcacacctgtaatcccagtgctttgggaggctgaggtgggaagattctttgagcccaggagttcaaggctgcagtgaattctgatcgcaccactgaactccagcccgtatgacagagtgagaccctgtttctaaaaacaaaacaaacaaacaaacaaacaacgtatcttactgactaaactggaatggaaatcttataattagtgttgtatttttctgcaaaatagtgaattggtacttgggagacttctgttctttgttgaaaaaaattgcctttgttttgaaattatatcacctgtgttctgaactaaaatgatgggagttcattttgtatttactttgcagtaagtatcatgtaaatatgcaaatgttgaatgtaatatagattgtgtcctcattgagtttttgggtgatacagtttataaatataacaattatacaccctcatacattcgtctgattttgagcttgtaagatgagaactgctttttacacatttaataaaaaaaggtctctgaattatctgatgtcatttatcaagcatccttctgtgcacagcgctatatactccccttcatgtacattatttcaaacattctactctcttctcttctcacctgttatctttctcttaatgttctccatctattgtgtcacaaaattatgggtccactcttgaaatttcttttagaaaggtgatagaaagtccaggcacggtggctcatgcctgtaatcccagcactttggaaggccaaggtgggtggatcacttgaggccaggagttcgagaccagcccggccaacatggcaaacgctgtctctacaaaaaatacaaaaattagccgggtattgtggtgcatgcctgtaatcccagctactactcaggaggctgaggcaggagaatcacttgaactgggaggcaraggttgcagtgagccgaggtcacaccactgcactccagcytgggcgacagagtgagaccctgtctcaaaaaaaaaaaaaaaaaaaaaaaaaaagggatagaggccaggcatggtggctcatgcctgtaatcctaacactttgggaggccgaggcggttggatcagttgaggtcaggagctcaagaccagcctgcagcctggccaacatggtgaaaccctgtctctactaaacatamaaaaatgagcagggtgtggtggtgtgcttgcactccagcctgggcgacagagcgagagcgagactccatctcaaaaaaaaaaaaaattaaataaataaataaataaatatgatagtgtgaaaagattctagtcaaaccaatttcataaagtttttcacttttctttgagaacaaaaataatacccactgttagtagtttggtagaaagtgcttcaaaaggatccctgcatgtaygacttacaaaaaatgaaaatttccaactgatagtatattttaggtcagatttttaagttttttttttaaggctattttattaaaaaaaaaaaagtgggctctgcgaacagggttagtccattcaggccttcaatcctggtggtgattttgtccttttcaatgatgtggacaataactcccatgtctgacactgcatcctggtccgcagcatccagcatggcttgagagatgctttttttttttttttttgagacggagtctcgctttgtctcccaggctggagtccagtggcgcgatctcggctcactgcaagctccacctcccgggttcacgccattctcctgcctcagcctccctagtagcagggactacaggcacccaccaccatgcctcgctaattttttgtatttttagtagagacgggtttcaccgtgttagccaggatggtcttgatctcctgaccttttgatctgcctgcctcggcctcccaaagtgctggggttacaagtttattcctactgttttacctcagtttgtatgtatgaggtcagattccatttagtcttcaggttagcatttgagtgagactaggtttattttcaaaacctgtaggagaatgaagtgagtagtcaagagagacagttctaatgactgcaatttgaaaagcacttaaagcaaaaattccaaagaaacacactgtaaaagaagggcaatcaaagagaaggtgggtaaaatttgggatgggatgggggtggtgattgagaaagagaaaagaacaggcctagaccaacgtggaaggtcaaggtaatttatgcttcatgtacgtaccctgaataagggaggcttattctgtaaagaataaacaatccacctatttttctgtaaagaataaacagaatccacctgtttttggttaaaagtaacaaaaagtcgccccctactgtcactttattgtaaacggaggaaaagtttgtagctgttcattctggtttagaccataaatatattcctaatgagctctaggaagcctgcaatgttcaaatcctgataaggatgggctgaaaatcactctgagaatgattttcactcttatttttaggcctgacttttattagtccattagaagagagagttaaaaagtacaagggaatacaggcctggcgcggtggctcatgcctataatcccagcactttgggaggccgaggcaggtggatcagaaggtcaggagttcgagaccagcctggccaacatggtgaaaccccgtctctactaaagatacaaaaaagtggccaggtgtggtagggcgtgcctgtaatcccagctacttgggaggctgaggcaggagaatcgcttgaacctgggaggcggaggttgcagtgagccaagatcgccccattgcactccagcctgggtgacagggtgagactccgtctcaaaaaaaaagacgagggaatactaagaaacaaaaatatgtctataaacctgaaggttcctaggctcccctttgattataacatttaaaattttaaagcacatagggccttagtaatatagtgtttaggattatgaactcaagtcagattgaaaccgggcatgatgactcacacctataatcccagcacttttggaagctgaagcaggaggatcacttgagctcaggagttcgagaccagcctgggcaacatagtgagacccmcccccccatctctgccaaaaaaaaaaaaagaagaaaagaaaaaattagacaggtgtggtggcacatgcctgtagttccagttacttgggaggctgaggtgggtggatcacttgaacccaggaggtcaaggcagtgagccatgatcccaccactgcactccagcctggtgatagaacatgaccctgtccctaaataaataaataaataaagtcagactgctttggttcatgttcctgcttgatttggggcattagacaaattgcttaaattctgtgttcctaagtttctaaaatcgtgaagttaggattctaagagcttgtaacttgataaggatgtaaagtttcatgatatctatataaaagcccttattaacaaaatagtaagagctcaaatgttggatattatatcttagtacctcgaagtcacatatctacatgggggactacttattttgccaccttttgcacatctatttttgctcatcgggtttccactgcctctaatgtctgcctgttggagacctgtttattctttgcaagtcaaatggcacctctttacagtttttctcactgccacccaaagaatttatttttctgtgttcccacagtattttcataatacattgtcttaacacagtattagttatgtgttcatgtgtttttcagatgcgttctgggtatatgactgaagtgagtcataggaagcagtgaactgctgctgcctggaacctccccctaccccattccctgcagtcccaccctctgcccagcatgcttaggaacattcattgtagggaacccaaacaatccctgtaagtaggaattaaagagatagaaggtaactagagtaaatagattaagaaagcaaccagatggcttaacatgtcatcagagactttctgtgcactttcattttcatggtatgaaaggttaggtgtatattgcaagttctgagatgtaccttgtcttgctgctgcccaagactgccttctatgtaagttccccctgaataaatttttggctacctaccaacctggagtggtctacctcttcctttggtctgagcttgccctccacttatggaggcaattattggttccagtagggagttttcctaacatgagatcaaagatatttctttccttttctttttttttttgccggagtcttgctctgttgccaggctggagtgcagtggctcgatctcggctcactgcaacctctgcctcccgggttcaagcgattctcctgcctcagcctcccaagtagctgggattacaggtgcgcggcccaagatatttcttaattatctttgtattccatggtgcggtgcctggtctatagcttattgtgagggctggcaagtctgaaatttgtagggcaggccaacagctgaaaacccagggaggagtcgatgttgtagtttgagtccaaaggcggtctggaggcagaatttcctcttccctggggatctcagtctttttctcttaaagccttcaactgcttggatgaggcccccactattatggaggacaatctcctttaagtctactgaattaaatttaatctcatttaaaaatactttcacagcaacgtctagactggtggttggccagatactgggcaccatggcctacccaaattcccacataaaattaacattcatagttggttttcagtatgtattttgggcttgaattgaatcttgtaggaaagagatatacatatatttttaaaagttataacgaaaaactggattacataaatgacaaataaagaatgttacaattaaaaaattgaatttctgcaattcagacatggctaaggagcttgtaatccttggataatacaagccactgcttccatgcctaattatgtatttaattatactaaaaaataatgataacaggtcctgagattttagaaatcaaatgagctcagagataatgagtgaactggaggataaaaaaatagatgccatgtctatttagatttatatattctccatcaactaggggctgctcarttctcttaaaaatagcttcaggaaagaggtgggccaattgagagcaggctcaacagataatctggctctcagactttttaacagtacaaggcacaaaagggataatgctgccatcttgtggtattgttctcccagttctacaaattctagtattgtctcaattggtctgatgaagtttggccggcctaggccttttttcttttttgagatagtcttgctctgttgctcacactagagtgcagtggcgcgatctcggctcactgcaacctctttctccgggttcaagcgactcttgtgcctcagcctccaaagcagctgggactacaggcacccaccaccacccctggctaattttttgtattttcagtagagatggggttttgccacgttggccaggctggtctcgaactcctggcctcggcctcccaaagtgctggcattacaggtgggagccactgctcctggctggcctaagcctttttaactataactttttaggcaaattaggattttctgtatggtctgacctttgtttaaacagtgagatgcttgaaagcaatctatctgaaacattttataggatttaagatattttctaacttcttgagtctcccagtttgatgttaggcttgaggttttgatcaattaatgatcaattcatctgtcatctattaacagccatgctcagaatcgtcatttaagaaaaacattccagtccaaagatcttgctgggatctttgggatcccatgtgtttccatgcttttattcatctgagcctacaatgtcaggccttaactgattggatatggggtggacacctggcccaagagtagccaacccacgggctagtcagtgatgaattggcctggcaggagaaactctgcctagatggagactgcagggaatctcaatggcttagtcaattaccatctggggaatatgcactagaatagtcagagtcaaccctttagtaattaaataagtgagagggcacacagatactgacagagtagatgagtattaagtggagatgagtaggaggttgatgaacttctgcttctgaaaggggacaaagtaatcagctccctcaaaatgccttggatcctgagccaatttgcctgtatgggctctgtgagacttgggcgctagacttttcttgggttctaggctaaggttcttgttttccacattttcacaaacatttttaccataccgccctcctgtgcctaacagatctctgtttattgcaactataagcatatcactgtcttgtaggttattctagtaagttatatttttcaaaatgttttaatgtacattatttaatttaataataaggatcctacttaggagtttatgtattttccatgtctgctaatccaggaattcaaggacgaagatatcaatgaccagcacagagatgtaatcttcctctcggccacacacctgggtgtttcccttatttttttgctgcgtgtttccttcatgtcgtccaatttcttttcttattctcatatttggctagatttttaataccagatctatgtcagctccttctcaaacctaaaattcagagccccagctctgttgagcgtgtattatatttcagttgctttatacatgttatctcataacagcaaccttaggaggtaactattgttattaccattttacaggtgaggaagctgagacgcattgggtctgataactgcccaggatcacacaggtgtaggtggtggggctgggatttgatttttggaaaaaggtgaattttcttaagttggagaccctaggagtagggatagaaattgaccttaggagttttactttaaatatcttgataaaactatatccataatggggaattayggggctacaccaatctatctgctatttttctttatccagtctgatgatattggaagaacaaaagtgaagaaggcatgagtttctctgtaaggagagagcctagtggtgaggatacacagaactgttattttcctgcaaggttgctttaattctagacagccggtaaaactccacacctctagggatagaaatgagcaacagtgagactagaactgggtgagatttggctcaggagcgtctccttgagataacaatgatgctgatagaaggaagacaaagctgctaggagaaattaacaactgcgggatggttaggacattcccgttaaggcagggctgttttgagacatttcatccccaccaccatctggagaaatctatccttgattctgccttcctgggcctgcatttctgggtctgtagcctaccactcagctccatctattttgcaccttcatagctttgaagaaagagcatagctagtactagaagcgaaatttttatcactggagaaagttagtttcccttagggataaatgtacagacaggaggtgatccctaagactcttactggcattaacgtactgtgacatcaatggctcttgctgcaattgcagcttccaggcaaatgcactcattgcaggtgggttgtttttggcctttaaccacctcacagcctaggcctcaagtgaggaatcctaagatctgtcaattcaccctctcagaatggaggaacagggaatagactgcttctgagtcagggcaagtacttctttcctgtttggattgcaagtataatagcaaggagagaggaggtgaggcacacacgaatcactttgtccctatgcagtctgcctgggagccgtcttattctactgactcaaaagacactcctgaaagcagtgccatcctgagcagcagcttgtattacttyacaagtcagacctgttattaaagacgcagactggcatttaaatcaggctgtgtcacacccatcctggtctttgttctggctcctatggtggccaggagaatgtgcctcacacacctccagccacagggaacaaaatggcctaagggctccattgctgtactgagacctatctgcatttgcacccaggcatgcttcctatacaggctgctcctagcaaatagttaaggccggcagggatactaagacaggtctattcctggaagacatgggacttctctgactttgattcaaggactccctgttagccttgctgaagctctgcttggtagtttaatgcttctccccaaccctcctttacttcttcactcaggcagatagtacagataagaacaaagaggctgaaggaagtggacgtgtttgaaggactatattatataaggccgggccaggcgcagcggcttacacctataatcccagcactttgagagtctgcggctggtggactgcttgagctcaggagttcgagaccagcctgggcaacacggtgaatccccatctctatttttgtaataaggtattatatttattttaaaatcgaaaatataggccgggagcggtggcccacgcctgtaatcccagcactttgggaggctcaggcgggtggatcatgagctcaggagatcgagaccatcctggctaacacggtgaaaccccgtctctactaaaaaaaaaaaaaaaaaattagccgagcggggtggtgggcgcctgtagtcccagctactcgggaggctgaggcaggagaatggtgtgaacctgggaggcggagcttgcagtgagctgagatcacgccactgcactccagcctaggtgacagagcgagactccatctcaaaaaaaaatatatatatatatatatttaattaaatatatatttaaatgtataatatatttaatttaatgtttaaatatataatatatttaatttaatatatatataaaatttaatattgaccatcagcgcggcgtgcagaacttcttagtgatggtaaccttctcatcagtgcatttcgatggctgggagagtggtgtatcttgtgtgccttctcataggacatattctctggtgggtcttttggccatatatatatatttaatatatataatatatatattaaatatatattatatatattaaatatataaaaatatatatattttattaaatatatatattttattaaatatatatatttatatatatttatatatattatataatatatatttatatatttatatatatttatatatttatatatattatataatatattatattaaatatatattatatattttatattatatatttaatatatattaatatattaatacaaattatattataataattgtatattatttatatataattaatatatatttaaatatataaatatataataaatatataattaaatatatattaattatattaatatataatatatatttaatatttataatatataatatataatatattttaatatatagaatatataatatatattaaatatatagaatatataatatatattaaatatatagaatatataatatatattaaatatatagaatatatattaaatatatattctatatatttaatatatattctatatattaaatatatatatatggccaaaagacccaccagagaatatgtcctatgagaaggcacacaagatacactattctcccagccatcgaaatgcactgatgagaagggcaccatcactaagaagttctgcaggccgtgctgatggtaggagtggcggttacaatctgagcttgtcagcatctgtgggcatgatgggggccaggaggtggcacttaactgccaggagccaggaggctttaattgccttacccaccaaaaggcagggtttgagtgacaatcactgggctttaccagcagggggttgtggacatggttaatggagcgtagtgtctattttgcacttagaagcaaaacaggcaggcagtcaacaaggatgcttttagcatctataacgggatcaacaaactgttcaggtaaagggctaaatattttagactttgcaagtcatacactctttgtggcaactgctcagctcagctgttgtagcacaaaagcaaccatagacgatatgtaagcaaacgagtgtcccgtgttttaacaaacctttgtttatgaaaaatagatgattgactagatcaggccatcaatggctcctgggccatcatatactgatcccctgatctatttatttttttaaagcaaattggaggagcaagaggctgagggcagtaatttcaataaaaatccggctcccttgcccagttcccagacttaagttaatttttagatctggatacatggactggagaggtggttgaaggaagaaccgtgcaacatgatggcaaacatatactgtgatgattcccctagtctcctcaaagggacctatggccattttcttgggtgactatacactgaagggggaataatcagacatttataaagtaattggacaggccaggcgcagtgggtcatgcctgtaatcccagcactttgggaggctgaggctggatcacttgaggtcaggagtttgagaccagcctggccaatatggtgaaaccctgtctctactaaaaatacaaaaattagctgggcgtggtggtgggcgcctgtaatcctggctacttgggaggctgaggcaggagaatcgcttgaacacaggaggcggaggttgcagcgagccgagatcgtgctgctgcactccagcctgggcgacagagcaagactccctcccgctaaaaaaaaaaaaaaaaactattggacaaagggtctgagttgcactgatactgagagacccaaagaagcatcatagccctgctgttagagcagagtttaggaggaccaactaaaaaatggggtgctagataaagcccagtttacaatgggcccaggaggcctgcagatccattcagtggtcacactacatcttttcccaccactcacacctccaacaccatgggggtctgctggcagagctgactgcactatggcttggacctgctgcagcaccctttctcgttctagccccactcaagccagaagctttctgtgtcacccagtacatgggccagaaatatatcccccaggggtggaatatgttgtctcaagaacacaaaaaggcctacaaggcactgccttctttcctcaaaacagggctagaagatacatcaatttgccttttactttagaacaggctattccagaatacttccaaccacgagacctccaaatatgtttctgaaatggcctgttctggactcttcacagggtttatctcctacgctctgaaatgcacgcatctcatcaaggcctccagcatacttgcccctctggctggtcctgtctaatgagctttatgtcatctcagtgtaatggatcaatgtgatatgttcttggatgtttaagaggtccagatctctcagactatcttataataggaggtgggatgggtaatataactctaaggcaaactgtaaattaatattgtatggtttttctgcccacagagcctcagccagcacttccatctggaagcttagggaatgcttgatccacagttgtggaatcctgcgtagcagagcatccaactagggaatctacttcaagtgaaggaggtgtgggagtgggtcctgaccatgggattctctggttgtgttatgaactgcaccacccagaagcaactggccttatagattgttgagatggtcttctaaagtwacaactgaaatggtagctctgagaaaggatgtgaaataatgaagtgccatctttcaggacacggtgcatttattaaatcagtgacctctctatggttctacttccctagtaggaaggatacaagggtcaggaaactaaggggtggaaggagaagtggccctacttaccatcgtttccagtgacccacttactaccattccccagtgatccactgggggattttctgctttctttctctgcaactctaggctctgcatgattggaggtcctgattctcaaagggaacacactcttgccagggatataataaaggtgccactgaactataagttgtggctgctgacagggtgctttgtactttttgtgttcaggcaccagcaggcaagagaggagctggtatactagyaaaagcactgaagtgatcgttagggggaggtaagttcatttacaagatggggcaaggaggaagatgtgtggaactcgggtgattcatttgggtacctcctgtactccctagccccattataactgtgaatagatagacgcggcaacctcagccttagaagagtatgattatcgtgagttcagacccctcaggaatgaaagtttgggttacaccaccaggtaagccaccaagaccggccaaggcgatagctgagggtgaaggggatttagaatgaatagtggaagagggagaaggtaagtactaattgtggtcctgtgatcaactgtggtgatcttgggactgtaattcatccaaccaaccccctctgctcagttgccccttaggaaggaaggcccatgaggactatggagkagctgctccttgcacctgtgtggagaagtacatctatacggctcaaggggtagattgtggtggccattagaacatgcctcacagaccttcagctacagggaacctcattttctgggccccagttactttgctctgaagtgtactgctatgtttgtactgaggatgcttcccatgggctactcctagcccagtgacagctcagcaaggatactaggcagacccattcctgagaacagagatggctacataatttgcaagatctagtgcaaaatgaaaatgcaggccccttgtcaaatatgatgaaaaaatttaagatggcagcagcagaggattaagccaagtattggccctgtgtgactatacaggtgacattctcattaagctgattctgcctggaaaataagggatttctctaagactggctctgacagttttgctaagccttccttagagtacacagctgtatacaaaacttccactcaacttttcgtccctgtcttgttcttttgaggtcagacttgcattgtaggctgattgctatctcaaccrtctccctctcattttctccctaagaatttgcttaaaaatccttgtatgtttagctctgtcttgatgcctgcttctcagagtacatggattaacacagagccttaattctgctatcttttcacacttgtatgtaacaaaccctccaacataaaatctctttttcccaccaataaaagcaatttaggcttcttatttcctggatcccagctggatactacttacccataaaatgacttgatttcaaatgtacagtgcaggtcacayagagattaaacttaatttgtatcccatttttaccatagcttctcccctgaytgacaaggctgattgtattttggacatgggattgcggtagaggttcccgggagaggaagagacatttggaagaaaaaggtgagaaatcagctgggcgcggtggctcaagcctgtaatcccagcactttgggaggctgaggcagacgtgtcacgacgggagttcgagatcagcctgaccaacatggagaatccccatctctactaaaaatacaaaattagccgggcgtggtggcacatgcatgtaatcccagctacttgggaggctgaggcaggagaatcacttgaacttgggaggtggaggttgtggtgatccgagatcaggccattgcactcccagcctgggcaacaagagcaaaactccatttaaaaaaaaaaaagaaaaaagaaaaaggtgagaaataattgagagaaaagagaattggagtaagaaagagggagaaaagtagatgcagaaaagccttcaacaaaattcaacagcccttcatgctaaaatctctcaataaactaggtattaatggaatgyatctcaaaataataagagctatttatgacaaacccacagccaatatcatactgaatgagcaaaaactggaagcattccctttgaaaactggcacaagacaaggatgccctctctcactactcctattcaacaaagtgttggaagttctggccagggcaatcaggcaagagaaaaaaataaagagtattcatttgggaaaagaggaagtcaaatttccatttgcagatgacatgattgtatatttagaaaaccccatcttctcagcccaaaaatctycttaagctgatgagcaacttcagcaaagtctcaggatacaaaatcaatgtgcaaaaatcacaagtgttcctttacaccaataacagacagagagccaaatcatgagtgaactcccattcacaattgctacaaagagaaatatctaggaatccaacttacaagggatatgaaggacctcttcaaggagaactacaaaccactgcccaatgaaataaaggaggacacaaacaaatggaagaacattccgtgcttatggataggaagaatcaatattgtgaaaatggccatactgcccaaggtaatttttagattcaatgccatccccatcaagctaccaatgactttcttcacagaattggaaaaaactactttaaagttcatatgaaaccaaaaaagagcccgcattgccaagataatcctaagcaaaaagaacaaagctagaggcatcactctacctgacttcaaactatactacaaggctacagtaaccaaaacagcatggtactggtaccaaaacagatatatagaccaatggaacaggacagaggcctcagaaataacaccacacatctacaaccatctgatctttgacaaacctgacaaaaacaagaaatggggaaaggattccttatttaataaatggtgctgcgaaacctggatagccacatgtagaaagctgaaactggatcccttccttacaccttatatgaaaattaactcaagatggatgaaagacttaaatgttagacctaaaaccataaaaatcctagaagaaaatctaggcaataccattcaggacacagacatgggcaaggacttcaygcaccaaaagcaatggcagcaaaagccaaaatagacaaatggatctaattaaactaaagagcttcttcatggcaaaagaaactaccatcagagtgaacaggcaacctacagaatgggagaaaatttttgcaatctacccatctgacaaaaggctaatatccagaatctacaaagaacttaaacaaatgtacaagaaaaaaacaaacaaccccatcaaaaagtgggcaaaggatatgaacagactcttctcaaaagaagacatttatgcagccaacacacatatgaaaaaatgctcatcatcactggtcatcagagaaatgcaaatcaaaaccacaatgagatactatctcacgccagttagaatgatgatcattaaaaagtcaggaaacaacagatgctggagaggatgtggagaaataggaacacttttacattgttggtgggactgtaaactagttcaaccattgtggaagacagtgtggcaattcctcaaggatctagaactagaaatatgatttgacccagcgatcccattactgggtatatacccgaaggattataaatcatgctactataaagacacatgcacacgtatgtttattgtggcactattcacaatagcaaagacttggaaccaacctaaatgtccatcaatgatagactagattaagaaaatgtggcacatacactttgggagaccaaggcgggcggatcacaaggtcaggagatcaagaccatcctggctaacatggtgaaactccgtctctactaaaaatacaaaaagtagccgggcatggtggcgggcacctgtagtcccagctacttgggaggctgaggcaggagaatggtgtgaacccgggaggcagagcttgcagtgagccgagatcgtgccactgcactccagtctgggtgacagagtgagactccatctttaaaaaaaaataaaagaaagaaaatatggcacatatacaccatggaatacaatgcgatcataaaaaaggatgagttcatgtcctttgaaggcacatggatgaagttggaaaccatcattctaagcaaactatcacaaggacagaaaaccaaacaccgtatgttctcactcataggtggaaattgaacaatgagaacacttggacacagggcagggaatatcacacactggggcctgtcagggggtggggggctgtgggagggatagcattaggagaaatacctaatgtacatgacaagttgatgggtgcagcaaaccaacatggcacatgtgtacctatgtaacaaacctgtacattgtgcacatgtaccctagaacttaaagtataaaaaaaaaaaaaaaagagggagaaaagtaaagggtagttgagaggaaacaaagaaggctaaaagggacattaatctattcacgagggatctgccccatgactcagacacctcccattaggccccaggctctgcctccaacattggagattttttttgagatggagtcttactcaattgctctggctggagtgcagtggcgtgatcttggctcactgcaacctctgtctcctggattaaagcaattctcctgcctcagcctcctaagtagctgggaccacatgtgtgcaccaccacacctggccaatttttgtattttagtagagatggggtttctccatgttgacgaggatggtcttgaacttccgacctcagttgatctgcctgccttggcctcccaaagtgctgggattacaggcataagccactgcacctggtggagatcaactttcattatgagatttggagaggaaaatcatccaaactatagcactaccttttaggctaataattttaaaaatgtgttcatctcttaaatcatgtagaaaaaaaatagtggaattaagactgttaaaacaatactaacytttattattgcccatgtatttacctttattgagatctttatttcttcatacaactttgagttactgtctagtgttctttaatttcactctgaagaactcctttgagaatttcttacaggggagatctagtggttacaaactctcgtttttttgtttatctggaaatatcttaattcctgtctcacttttaaaggacagatctgctggttatacaattcttggttgacagtttttttctgttttagcactttaaatatattggcccattgctctctggcctcyaaagttcctgatgagaaatctgataatcttatcaaggatcccttgtatgagacaaattgcttctgtcttgctgctttcaagattctcttttggtctttgtttttcaaaattttagttataatatgtttagtatggtctctttgagttcatctttcttggagttgagctttttgtatgtttgtatttatatattttatcacatttggaaacttttcagccattatatattcagatattatttctgttcctttctctttctcttctcctctggaactcccacaatgtgtatgttgatctgcttgatggtgtcccacagatgtcttaggctctgttcactttccttcagtaatttttatttctgytcctcagacttaataatttctattgtcttcaagttctattatcttcaagttcactgattcttttgcttgctcaaatctgcctttgaatccctctagtgaatttacatttcagttattgtactattttttttttaattgagacagaatctctctcactagtgggaggctagagtgcagtggcatgatctcagctcattgcaacttccacatcctaggtttaagtgattctcgtgcctcaggctcctgagtagctgggattacaggcaccacagctggctaatttttgtatttttagtggagatggggtttcaccatgttggccaggctggtcttgaactcctggccttgagtgatctgcctgacttggcctcccaaagtgctgggattacaggcatgagccactgtgcctggtccagttattgtacttttgatcttcaaaatttctttttagattatttttaaggttgcttttttctctctgtctctctttctctctgtctctctttctctctctctttttccttctctctctcattctttctctctctctttttcaacaggatcttgctatgtttcccaggctggtctcaagtgacccccctgccttctgagtggctgtgactgcaggcattcaccactgtgcctggcttagatcttacatctattttttgatattttcattttgttcatacattgatttcttgattttctccacatcttccttttgttctttaagcatctttataataattgttttaaagtgtttgtctagtaggtctgccatcaagtctttttcagggacagttcataatgatttagtttttcctttgaatgggccatacttttctattctttttgtatgccttgtgatttttgttgaaaactggacatttaaatctaataatgtgttaactctggaaatcatatttttcccctttcccagaatttgctgtttattattattattttttattgttaattgttgtgggctgtctctgtgcaaagatcagctaaggtgtcagcttagggtcttctcagatctttcctaaatctatgcatttctttgagaatacacagtcactttctaattttccccatatatacagttgcttttgagtgtcctagtctttaatgtctggctattaaaagagagaaaaaagaaaaatgaagaggtgaggaaggggtactggatctttaaatcacttgaaagtcacttcagcttgagggaaaggaggttgcaacggggtkggggggcaggtgcaacaacatggccacctgcctctttgtctgcatctttatgatcagaagctgcaatcagcaagcagagcacacatcctcaatattgtagcggcatgctttttgcccaccctggctcccacaagctatatgtaagctgttcctggaacatacaatatttttgagacaagatcttgcttagtcaactaggttggagtgcaatggtgccatcatggctcactgtagctgtgacctcctgggctcaagcacccctcccacctcagcctctgaagtagctgggaccatacgcatgcgccaccaaacctggctacttttatttatttatttattttttggagacagagtctcactctgttgcccaggctggagtgcagtggcgcagtcttggctcgttgcagcctctacctcctgggttctagtgatgctcctgcctcagcctcctgaatagctgggactataggcgtgtaccaccatgctcgactaatttttgtatttttagtagagatggggtttctccatgttggccaggctggtctcaaactcctgatctcaggtgatctgcctgccttggcctcccaaagtgctgggattacaagtgtgaactactgcatctggccttggctaatatttttaaaaataatttttagaatttttgtagagatgaggtcttgccatgttgcccagggtaatcttgaaaatcgtgaactcctgggcttaagtgatcctcctgcctcggcctcccaaagtgctaggattacaggcatgggctactgtgcccagtcaaaatatgtactttattactgcagctaactgagacaaattaatatattctcttttagagtgatgatgtgcaaacacaaagataacttttggtctccacagtcccacttgctctgaggtattctatggcccaagagacacaatgtttattcttttggcatatctttgaggtagttcttgaagtaggagaaaatattttaactcctttttctttccttttttttttttcttttgagacagggtctggtttatagcccaggctggagtgcagtggtgtgatctcggctcactgcaacctctgcctcctggacttaagccagctcccacctcagcctcatgagtagctggaaccacaggcacatgccactatacctggctaatttttgcatttttttgtagagacagggtctcattttgttgcccaggctggtctcaaactcctgagctcaagcgatacaccagccttggcctcacaaagtactgggattacaggcatgagccaccacacttggccttatctccattttaacgatgacaaaattcaggtgtaaagaattgccccaaacgcgatttgagaccagatttctgagaaagacttgatgttagatccagtacttttcttatgtcctaggagacctttctgggtagagtctaagcctgcctgagccacacccctccctgccctcccgcactctagtatacatttatttagcagaaccttttgtggctctaggactgagtattattattattattattattattgagacaaagtctggctctgttgccccggctggagtgcagtggcacgatctcggtttactgcaacctatgcctcccaggttcaagtgattctcatgcctcagcctcctgagtagctgggattacaggcatgtgacaycatacctggcaattttttttttttttttgtatttttagtagaggcagggtttcatcatgttgctcaggctggtcttgaactcctgacctcaagtgatstgcctaccttggcctccaaaaatgctgggattacaggcatgaaccactgtgtccagccaattttcactattataccactttgtttatatatgtagaaaaaagtatatgataagaagatcttatatttgtggagcctatagtagacatctttctttccccatctgctgctgccagtattcaatccccctttccattttttgaaggaatacccatcataatagttctggcagaagtaagggggccaagtatattctccctgctctgacagctacaatgctggcctttgacatacagttggtcaattggaaactcccactgagaattttcactctcactctctttatatttgtgtygttcattctacagtaatttgtgatgacatgggagcatcctgggggtagccaggctgtttctactaaaagaaggtggacattctgctttttgattatccacagctgtcctcattcctgtgcacttctcctcccatcattacccatcattttaatggttctgtgaatccctgagagccttttaatgtcccttttcttytttttcttttttttgagacagaatctcgctctgttgcccaggctggagtgcagtggcacgatttcagctcactgcaacctcaacctctgggttcaggcagttctctgcctcagcctcccgagcagctgggattacaggcacctgccactgcacctggctaatttttgtatttttagtagagacggggtttcaccatcttggccaggctggtggtgatctcctgacctygtgatccacctgccttggcctcccaaagtgctgggattacaggcgtgagccactgtgcccagcctaatgtcccttttctacttaaggcatccagagctggtttctttcttgcaaccgataatgctgattgagatagaacctccatatacattagtgcttcttgtctgaaaacaacaacaacttgaccttcaatgacacagatgaggttactccagctaccctgtagactgatgtagttttagttattatttgataagcagattagctgtgaggaaaacagcatgtttgggaggtgttggggctgtcttttaaaaacgaggcatgaaacccaagtattgccctgtaatatggtttggctgtgtccccacccaaatatcaacttgaattgtatctcccagaattcctaggtgttgtgggasggactcagggtgaggtaattgaattatgggtgctggtctctcaagtgctattctcatgatagtgagttagtctcacgagatctgatgggtttattaggggtttctgcttttgcttcttcctcattttctcttgccgccaccatgtaagaagcgcctttcgcctccctccatgattctgaggcctccccagccacatggtactgtaagtccaattaaacttctttttcttcccagtcttgggtatgtctttrtcagcagtgtgaaaacaaattaatacaacctgttcatctgcctatctggttctgagactgccctgtggcttggcaggatgaaacaccatgtgatgcttgctccctgatgcatagcaagaactcattcccagctctcccacaagtctcattgcttagctgtgaagccttggctgggttactgtcccagctagggagggtttgctggggaggctagggtatgagttgtttctctagctactcatccaggaagcatttgcagcagggaagggatgagggtggggcttgctgatcgggcaggaaagacagtactggaggatcagcctctttgctctgatcttcctcctgagccttccctttcttgtgataaggatccctttcactgttccattctctatttccacccattcctgttgccagcccttcctgcccacgtgtctgcaaatcttcccagagccctgatttggatttattttccttctcccggatgttcttgaattggggtgtgttcctcttagtgctagctcctcctatcacttcytcttcccatcctttaatgatacttctttcagtttcccatatccccaagtgcactttcattcctcrcaaacttcacatgggtaggaatcaagtctgatttttttcaacagtgtatgcctagacagcgggcacagggcttgctggacacagaaggcaaggactcagagaatatccaccagatgaaagaatgactgcatgagtaagtgagtcaactctcagtccccttccttgtctgatgggcaagttacaacttctgttctcctttgaagtattctcttttgcattggaaggarggctcttgagtgagatagtagaatacatacactggaggatctcagcatgtgggatatgctcaggacatttccctccccctcccctcccctccctccctccctccctccctccttccttccttccttttttgatggagtctcgctctgttgcccaggctggagtgcagtggcacgatcttggctcactgcaacctccgcctgctgggttcaagcaattctcctgcctcagcctcccgagtagctgggactacaggcacgtgccacaatgcccggctaatttttttgtatttttagtagagacggggtttcatcatgctggccaggctggtctcgaactcctgacctcgtgatctgcctgccacagcctcccaaagtgctaggattayaggcacgagccaccgcacccagcccaggacatgtttcttaactctgaatctggttccacagccatcaatctcaaaccacccagcaggcagcacatctcctgtgactccttcccgcctgcatccttcccatttaaaccagggcttcttggcttggatgtggagggtgatgggactgggaagtggggtgaagcattttggaaatataggaggggactttttatttgtcataaatttgggagagagtctattggcatttagagagtgggaaccaaggaagccaacctcccytgctatgtgaacagggccatataacaatgaactgtcctggccagtcatggtggcccactcctctaatcccagtaccttgagaggctgaggcgggaggatggcttgagcccaggagttcaagaccagcctaggcaatgtagtgagatctccatctctacaaaaaaaaaaaataaataaatttagaaaaaaattagttgggcatggtggcacatgcctgtggtctcagttatttgggaggctgaggtaggaggactgtttaagctccagaggtcaaggctgcaggaagctgttatcgcaccattgcactcaaacctgggtagcagagtgagaccctgtctcaattaaaaaaaaaaaaacccaaaaaaccaaaaacccaattaactgtccagagtcctgcacaatttctggtgtcctgtgccttgcaccaacattcaagtatgcaaaaaaccatttttttggtaaagttatttaggttctagttcagataattataaacattaagcattttgcatggttttcatactaaaatttccaggaatgtttctattggaataaaggaagaaaagagtatactttgttttgttcagagcttctttaccagagttatttgccatttcaaaaaatcatgttggctgggtgcgatggctcacgcctgtaatcccagcactttgggaggccaaggtgggtggatcacttggtcaggagttcaagaccagcctggccaacatggtgaaaccctgtctctactaaaaatacaaaaattagccatgggtggtggtggatgcctgtagtcccagctactcgggaggctgaggcaggagaatcacttgaatccgggaggtggacgttgtagtgagctgagatcacaccactgcactccagcctgggmgacggagtgagacttcgcctcaaaaaaaaaaaaaaaaaaaagaagaagaagaaaatcatgtcacagaagcaatgctgcagatggaattgagttaccaataaaagtctacagtctgcgtttgtattgtattgttcatgatgattttgccatagatacagtcagtctctttgattaaagatagaaagtatcagttgaaaacatttaaaaaaataatattcaaggctgggcatggtggctcacgcctgtaatcccagcactttgggaggcccaggagggcagatcgcttgaggccaggagtttgagaccagcttggccaacatggtgaaacctcatctctactgaaacatacaaaaattagccgggcatggtggcacacacctgtagtcccagctactcaggaggctgagacaccagaattggttgaacccatgaggcagatgttgcagtgagccgagattgctctactcactgcgctccagcctgggcaacacagtgagactctgtttcaaaaaacaacaacaacaactatatatatatatatatatatatatatatatatatatatatatatatatattcaaaattcataaaaccaaataagtgtaaaagaaactcaaactttcaagggtttatttttgtttgtttttttgaaagcttctagcacttgcacttctcaggttatgagacttttgggacaccctgtatttattgtaaaaagggttactgaatctgatatggtggagaaccactcactgagactttacatcaacctggaaagagccgccaactgaaaatgtccagtcatgaatatgggatgggacactgtggaggccagtggctggaagccagcttacccctgcctgcgcgttttgaaggaagggctccagcgcacaccaaagctgaacctcggtcaccttctctgtgaaatgagcgcgggaatacctgtgtttctgggcagctgtgtgaacccggtgagaagcccagggcacataggaggacccagtgggaacagccagagcctctctgcacagcgccccgcctccgcttttgcctgccctgattacaaaacgctgttggcacccaggggcggaagcgtcaggtggcctcggtgtcctccgcctgtgcgccccagcctgcggggccgcccttcagggcgcgcaaggggcgagtctktccagccggcagcaccccaggccggatggacgcttgttcctggttctgtgccccgtgagcgctcaacgccctggtgtgttcactgaccatggtgcctgggctgcggcgccgggcggggcacggcgggacttttcgggacctttcctggggggagcctcgctttccccgcctccagcctccgcccggatggcaggcgggcggggccccagtccaggccttgagacccagaagggagcgaaggtttttgctgcgccaacgcagtgaccgaaggctccgctcacgccygggtaagaggcatccgcggccgatctttggccctgggccagcggagggagactgggcggggacagcgaccaccactgaggctgtttgttagcttaactcggtttccgcagctgggactccgcagacccggtgcgccgcgccccaaactttgcttcctcaactccggacacctgcagctcttgctgcccttgtctggaacccgggtcttgggactcttgcttccttctcagagtgtcagagcctcagggccgcggagaggccaacccgcgaggggtgcttaaaaaccgaagtatccgtggtcttggtgtgtggacgtttctggcgccttccacctgttgactgtcactcggcaccgtcctggagcgggagtgggtgctcggcgtccgggggccagggattgacacagtcatccaccgacactgcgcgtgggacagagggggcgctcgaggggtcggctgcagctgaaacctgaaggggagaggatttagggcacctgctgaacaggaattggtggaaagggagaaggggtcttctggtggaatctgggctcatttcctttcctcttcatctgtctcttttatttatcaaaattccaacctggctttttgctcaaagacgctgaacagagcccctggctttgcctgcgctgcccattgctataatgcagggctctgttccatttttgtgctgtgcacccctttggcatttctgggaaggctaaagactctcagaacaatacttttttttgagacagagtcttgctctgtcgcccaagctggagtgcagtggcgcgatctcggctcactgccacctccacctcccgggttcaagcgattctcctgcctcagcctgccgagtaactgggattacaggcgcagcacacctggctaattttagtatttgtagtagaggcgggtttcaccatgttgcccagctggtctcgaactcctggcctcaaatgatccgcacacttcggccttccaaagtgctgggattacacgagtgagccaccgcgctggaccagaacaatgcttttttaaaggtataaaacaaaaggaagagtattataaaggaaaccaattgcaaaacacatgtcaaaacattaaaagaatttatgatatggtaatatatatgtctttaaaaaacgaatgcgttatttaataacaaggttattaaataacaagatctagcagtggattaaatagttaccataattttgaagtagtaaagaacataaacaattatttcaagatataggtaatacttgtaatataagaaaatatctgtaatttctttcttcttttttttttttttttgagacggagtctcactctgtcaccaggctggagtgcagtggcgcgatctcggttcaatgcaacctccgcctgctgggttcargtgattctcctgcctcagcctcccgagtagatgggactacaggtgtgtgccaccacacccagctaatttttgtatttttagtagagacaggatttcaccatattgtccaggatggtctcgatctcttgaccttgtgatacgcccaccttggactcccaaagttctgggattacaggcatgagccactgcgcacggccaatatctgtgatttctattggtgacaaagtcttagtattgccaatactgctgtggtttgttggctacatacataattgaagtaaatgttaaatttcagttagatactagagaaataaaagatgtaaatattaaatatccgtaaaaataaagatgtaaaatacttttccatctaagtttttgggtccaggttaagatcctctgatagtagaaagggcactgacccaatgacttggcttctgggcttgacacttccattgacatttccaaggcccattgtaaccttggcttttttttttttttgagacatggtcttgctgtgtcgcctaagctggagtacagtgaggtgatctctgctcactgcaacctcctcgcaggttcgagtgattcgcctgcctcagcatccctagtagctgggattacaccagccacccaccaccacacctggctaatttttgtattttttggtagagacagggtttcaccatattggctaggctggtcttgaactgctgacctcaagtgayctgcccttgtctgcttcccaaagcaaccaccacacccagcttaactttggcttttgaatttcttttcgcctcagcttcttcattgtacagtggagataataacaccttcccaagtatttaaggcacccagcactgcacttagtgtagagggctgaagtagataccatttatcagaacttatttgtatccctcccaagcttatggccttatatccccaagcctggggaggtactcattatttattgaatgaataagtgggtcagaaagggttgcttgtgactaagtccaaaaaacaaaattcattaaggagacagctggtggtttgggaaatgactttgtttaaatttggggctttttttctggctggaaaaatatataaacacatttggaacgggggtgtttgaaatgtcagtcagggcccagggtctgtgtgtgcgtgtctgtgtggctggtgttctgccagtgaaaatgaaactgaatgttgaaaggaaaccggattcctttgcagaacagtttctcctccatgttgcctgtgtctagctttgttaatccgatgtgttgtaacacaggaaatgtcttataaagaatggagacggacccatgacaaggcatttctgggcatagatgtacttttttcttctcctttcacgtttccctgctccactatctactatataactcctctttgactctgaagacttggtaaataggagcagtttggatagcttatggaaagctgcccagacctggctggaagccaactagttgcttcttaatcccagccttaaaaatctttgtaatccccagatgtaggtggtaataataataaagaaaagtagatctagccaaccatccctgtgatttacattgagaaagtgctaaattgggacaggaggtagagaactttgtggaaaaaaacaaaacagaacaaaaaaaccctcggaaatttagaacacactgggactatctatgtctgtaactttgggaagggcaaatactggtgttatggactcaccaaattcatatattgaaaccctagcccccaggatcttagaatgtgactgtattaggagatagtgccttagttagaagtggtggtgagcacctgtagccccagctacttgggaggctgaggtgggagaactgcttgagctcagaagttcgaggctagcctgagcaacatagcaagaccttgtctcaataaaagaataattagccaggcayggtggctcacgcctgtaatcccagcactttgggaggccgaggtaagcagatcgcttgaggctgggagtttgagrccagcctggccaacatagaggaaccccgtctctactaaaaattcaaaatattagctgggtggggtagtgtgcacctgtaattccaactactcagggggctgaggcatgagacttgcttgaaccggagaggaggaagttgcattgagccaagattatcatgccactgcattctagcctgcgcaacagagcaagactctgtctcaaaaaaagaaagaaagaaaaaaaaaaaagraaaattaagttaggtcattaaggtggagccctaatccaatatgaatagtatccttataagaagatgactcgtcaggagcacatgtgcacagagaaaaggccacgcaaaggcacactgagaaggtggccatctgcaaaccagggagagagatcccaggagaaaccagtctcatcagcactgaggtcttggactttcaatctccagaactttgagaaaataaatttctgttctctagacttcatctagtctatagtgttttgttatggcagccctagaaaattaatacaactggttctaccaaatggacaataggtttaaaaaaaatggctacaactaggcaccatctcttttaagtcatgatcccgacatgtccatcacttgctcttaggatctcttacccaacctatgcagaagagtctcccatgtactttccttctacagacaccctgtgtggtccctaggatcttgcctgaagttgttaaagccatattcagcttcatgattttgactgttaggaaaagaaaaacttggcctcttcagcaagtgacctaggttagctgttgtgccatgtacatagtaagtactttgtaaatgtatggtgggtgatgggtgatgatgttatgatcatccttaaataccatggggtgactcccttctgatcataatgaatctccatgttttggccctagcccagccctcagggaactttcatgccacctagctgggaaccagcagctctggccctagctacatgaatggagagaaaatggctatgtctgtatcctggtaccaattcctgacttctgggagggagggctgcttctggaagtggggattgtggtgatttcactctatgataactttcttatatctttggctatttgttctaaggtagcccatgatgtctccataggaaaatgatgtgttttaacaaccaccatgtttggagtatagattgtgagagctcttcaagacagtgctgggtctagtaaatgtggttttgtgtttctgtgagcacataaatgatgcttgagatggatgaggggccatctgagtttggaggaaaatcatgagcctttcaaggtctaggtgatcaaatctaagcttgttttgaatcattgagtaagaaaggtctttaatggcaactagacacctccacttattttacactcagggaaatggactcaaaatggtaaatgactatctcatggtcttacaatctccatttcctcacttataaaatgggaataataattcccacctctctggtttttgtgagtaattacgtaaagtgcatagcacaatgcctgtcacatatcaacacttccacaaatgatttggggacttgcggggagagattgagaggaatggtttccattctaattatgttccagacctgcttattaaagccttgttattctttgccacaaaaattcacatctctgatcaatctaaggagttattagaacaagcgtccccatttgaaagcctgcttgtgaacttccattttccttttctcatttagaggatagcaaagttttagagaagcaggggacctttgatgccacccaatctgatcctttattccattgatgaagaaagcatggcccaaaatgggtcaggaagagctgtacctagcactccctggactgtggtcctgggtctcttgactcttgatatgccctcagacaaagcttcaccaggaacgggtcattgtcatctagctggacacagaagagacgtgagctgtctacacctcattctgtctcaactattaaaggattgagtttagagtctctccaactatgtccaaatagcaaatgtataccttgaaattaaagagtgttttctcattatggtaagacctcacacactggattccaaggaatgatatacttgaatgaaatggccagtccsgtttacagtgaactccttgcatgtgagactctgagtggaaatcccaatgctcctgaggctgatgagtaattttaatgtggtcatttaacaaactcaggaaaacaagttcatccctgttgtgtgactgggagtacactgattccacctcaggcttctttttccagtgagtcatgtcctacagtctgcagatgggcacacacaggcatatacagactagaaaggaaacctgaaaattacctgaccagaggccaactatgagtggtggggttgaaggggagctaagtcgtgcttctttatgtactagaatrtgagaagtcaggctcccactggctacagcaagcagaaaaacaaggtgttctttcattttttttccccctatataattcagtcaaaactcttaactktcatttgaaataatccaattgactgacatatwttttctttcctggaatctgaatgcaagcattttccttatgtaaatataatttgtgttttctgcttagcaattgtattggtttggtgaaattgtcagttctcttgttacaatgcattctctgattgtaaaataaggataggtcaggataatttgtaggaaatttctcaggagcaaagggagccactgtttcattgtaaagtcctcattagcaactcttaatcagtaactctgcaaagaaaattcctacagttttgcccctgaagagtgagggaactaaagaaccccagtgcagctcccagtccttgaatcatcagagagctatatagattgttcctatttccccagtgactcagtcctggcccactactggtgtacttgcttcacagcttaatatttaaacaaatgtttggatttataacagctccagagggagagtttcaacatggccctgcagggctaagtgaagattgctccattttctttatttgttaacagtatagtaatccagttcctgaacacacaaggcaagaatagcactgccattactcaagcagaggtgtgccaagaggaagagcacagctgctatcctttctcggaacaacactcattcagttttcaaggggggtgctttccttctccctcacagtgccttggacctttactccactttgagtaattctagtattgctgctcacatcctgtcttcattatattcacctgaacaagtggatataatgtcatcgttcacattcttccttcttctttatcccctatagctgattgtcgcaaaaatgtcaatgtgtgtctcacattcacacccctcatctctgttcccattcagaccccrccctcactgtgcctgaatttctgaaacagccgcttaatggatcttcatattcctggtctttcctgttataacagacagactcttcttacccatcactggctgtgcagtgcctagcacaatccctggcatttagtaaacaatcaaaaatgctgaactcaactgaattgctccagttcatcctctcagcttcccctggggactctttataaatccagttttattaagaccttccaagggctctcactgccattagcagtaaccacaggctgaaatgcacaccagggctgagcaggtaacaaatgaacaacataggctgagtggggctggagtgaactgaaaccttgtgcatggtggagaagaccaatgactgctcagctccagccaagagtttccatgtgagaatgtgggcttagtgttagaggccaagaatctggaatattttttgtcgagatctccaaattttttaatgttgatgactaattcaaaattcaagaaaagcactgtgagccaagcaaaacacagctctggcctgcacttggcctgcaggttkctgctttgtgactcctagatcaaattgccattgtctgggawtaagctctcagacctaaactttagtaacacatgcctatccaatctcatttctccctcttcccagwgcgctagactgccctcctttatatccaccrttaggagattctcattgcaagtgattctmctttcaaaatcttgaacycaactgtccaaaagtagcccgaacaggtccctgccataacttccctttttctgctcacataattcctttttcttcagctgtctagatgtcaactttgacttttttttttcttccagaagtctttcccacgtctcccaaaattattctctcttcccagcctctatcttatctgaatctttgtttgcayttctaatgctaacacctaattcaggagcttatcgctcacacctggaccactccaatagtctcctaactgatttgtcaaaatyagyccatgtgaaactggttttgtttctcctccaacaggagggttaatttgttccaacaccagaagattctcttactcaaagctgcccctttgtgcgatcactttccagaactttgttttcccatgtaaagcctcaatgccctagctaaaagagtgggagggggtcaggcctggagaaattgctgtctctcagcwtgcatccttacatacagtgggcgctcaatgaatacttgtggacacattcttttttctttttgagatggagtcttgctctgtcacccaggctggagtgtagtggtgcgatctcggctcactgcagcctccgcctcccaggttcaagcaattcttctgcttcagtctcccgagtagctgggactacaggtgcgtgccaccacgcccagctaattttttgtatttttaatacagatagggtttcactgtgttagccaggatggtctcaatctcctgacctcatgatccgcctgcctcagcctcccaaagtgttgggattacaggcgtgagccaccatgcctggcctggaaacattcttaaacagcagcagaattgtgaccatgcgaatttcatgtaagtctatttcayaaagatacacttacatatttarcatagctaaatgtaagtaatttaatcgtatatcatttgygcaggtaaaaattctcctaataaaaattcagcttagattatctttcctgattttcagttctgcaaacttagcccctgtgtgattgagacaaattcagtgtaggtataaacctgaatttgcacatagacttatatgctgcagaaaacttgtttctcaccttcttttctgagcacttctggctgatgccctcctttatcaaggttaaatggataaaatagatgtgaagatttttcttggtggagaagatatcttaagtttcaatagaatggaggatagtatatgacaaaggaaaggaaggccacgtgctgctkcttctagagcggttactgccttaaaaactcaaactgtagctatgttatttagttgcaaaaatttataaaaatttagctcaatcacccacaaattgtaacattcttcggtactatgtaattaaattgcattttagagacggcatagagacggcgtattttttttttctcctttttgagacggagtcttgctctgttgtgcccaggctggagtgcagtgacgcgatctcggctcactgcaacctctgcctcccaggttcaagcgtttctcctgcctcagcctcctgagtagctgggattacaggcacccgccatcatgcctggctaatttttgtatttttcagagacagggtttcaccatgttggccaggctggtcttaaactcctgacctcaagtgatccacctgcctcggccttctaaagtgctgggattacaggcatgagccaccgcgcctggcttttwaratgccgcctgacagtttagtggatatgtgaggagaagaagccgagcaaaaatgtgttaaacatgtaaaagcttccatctgactgaatagttggcacatgcattttaatctagatgtattacaacgtacctgggatttgttttaatcaagtatggtraggccaacagatcaggaggtgactgccatgaaggaagaagctcttactcacagttccctagaaacaggaggcataacacctcacatggggccatatgggaaagcacctgcrtaggtsarggggcagaaaaagtgaggggaaagaacaggcaaaagactgtattgtgaggcaggggaaagggctggcyaggtttgggattggctagtttgaataattttagagtgctccaggattcatgagctgcctatagttgtagttgtctgatgcctggccctggaataataagggcaggggaaaattgcctcttgcagggttaaagccaaatagaggaggtggttcagaatatggctctggattgattggtttacatatcaaaggtgtggtcataggcaagccaggcaagccatttaccatctctcagagttagctagtcctgggaggggcagtctctgggattagcaagaccccaaaatgtcaaaccataaaaaaatacagacaatgaaaaacagaattaatacagcaggattcagaatattgacaggaaggggaaacagtcagttgccttcctggtttcatgaagtatctaatgcagtgccattgatatgtgctgtaaatattactggacacgttacttgcatgtattttggattaagaggagattatgctaaggatctcatttatgggctaatgtttggcattttcttggcaaccaaagtcatgctaatcaggtgacagtaacaatttcctttttaaggtatttccagatttagacccgccttcttagagtttaagtcagagggtgtgatggttaattttatgttccagtttgactggactatggggtgcctagaaatttggtcaaacggtattctgggtgtgcctgtgagggggtttctggatgagagtaacatttgaatgggtagattgagcaaaacagattgtcttccccaatgtgggttggccttacgcaatcagctgaaagcctcagtagaacaaaaaggcgaacactcccgtgaatgagagacaatcagccctgcctgcctgagtgtcttggagctgggatatcggatgttcttctgtgttgagagtcaactgaaacatggcttgtcctgtgtcttgagctggccttgagactgaaactgtaccataggctctcccgggtcttcagcctgctgactacagaattgggacttagcttctataatcttgtgagccagtttccaggaatgtccttcatgtaatagggaaatgatgatgtttgctttggttgcctccctcattcctttcacctcctccagttaaatcttgttttgaccctttattggctgtgggtgcagggagttttcccatgttccaggaggcagccagcttgtaactagcaagcattgctatgtttgtatttctgatacattttctaaaagagatcgcagaacaaagggtcctgactcaccaaggatacaggtatttgttgtgatttactttctcattcaaaatacatattggatattgtatctaattttgtattggtaattttgggttatgaaaccccagatttgaagccccaaattgtatagggttcaatgcccataaaacccagatctgcccctgcttagaggccrgcccctctaggagacagcatgtggggccacccagagatgcaggactcttctgttctgccctatcgcagcagagaggccatccctggagctggaaggtgcagactgggaattgctccttctctgaattgctagctcctgctaatgcctgcattgctgctgcaaaggatattcagaaaaagttgctcgtcagaaaaagaattcatgctagctctggccctgctgctgatgcattgtgtgaaacccttgagtgacttcacctcttggaactcagttttcccatttgtaaagtgatatcartacttccggtgtgggctcaggtttgggccctgtgaattgtaaagctctatgcacatgggaggatgtatgattataagttgtgttgctattacttgtattgctaatatcttgctattattgaaatatgcccaaaccttaacatttcagtgactaaagagcaaaaccagtgttcactctgacatagtttttttaaatttttcattcattcactcattttaagtttttattgtgtaaactttcatcaaacatgtacaaaaatagactgccacaaggaatgcccatatatatccatccactgatttcaaattattgccaactcatggcccattttgtttcatctacacccctacccacttacacctcctaaaatattttcaagcaaattccgagtcatttcaactataagaatctcggtgtatatttctgaaagataaagactcctaaaaaattaaatcagtactattattgtaccttgcccttctctgccaaaaaaacttaatttctttcttttcagtttatttagtaagctaaaatttagtaacagggaggccgaggctggtggatcaactgaggtcaggagttcgacaccagcttggccaacatggtgaaactccgtctctattaaaaatatataaattagctgggtgttgtggtgggcgcctgtaatcccagctactcaggaggctgagacaggagaatcgcttgaatccgggaggaggaggttgcagtgagccgagatcatgccaccgcactccagtctgggcaacagagtgaaactctgttagaaaaaaacaaaacaaaacaaaacatatattcactctcacctcccacctcactccatgggattcaaccaagctactttaacttttttttttttttttgagacagggtctttgtctgtggcccaggcaggagtgcagtgaggcagtctccactcactgcaacctcctcttcctgggttcaagtgattctcctgcctcagcctccctagtagctgggattatagaagcacaccaccacgcttggctaaattttgtacttttagtagagatggggtttcgccctgttgcccaggctggtctcgaactcctgagctcaagcagtgcgcccgccttggcctcccaaagtgctgggattattttattttcattcaaatttaaagtagcttgggccaggcccggtggctcaggccggtaaatcgcagcactttgggaggccaaggcgggtggatctcttgaggccaggagtttgagaccaacctggccaacatggcaaaatcccgcctctactaaaagtagaaaaattagctgggcgtggttgtgggtgcctgtaatcccagctactcgggagacttgaagcacaagaatcgcttaagcccaggaggcggaggctgcagtgagtggagatcatgctgctgcactccagcctgggcgacaagtgacagagcaagactgtctcaaaaacaaaataaaataaaataatttcagccaacaggcatttttcctgaattattagatagtttgaattaagttctgttgcttagtcatgtgaccttaggcaagttctctatctctactcaaaccctcaattttatcatctgtaaaatggggattttatttataaggttatgaggagtctttgagacagcacaagtacaactggtaaacaataaatgttagttattatttcaatgatagttttttgttttttwgtttttttgttttttttttgagacggaatcttgcgccaccgtcaccaggctggagtgcagtggcacgatcttggctcactgcaacctccgccttctgggttcaagcgattctcatgcttcagccttcccagtagctgggataacaggcatgtgccaccatacccagctaatttttgtatttttaggagagacggggtttcaccatattggccaggatggtctccatctcctgacctcgtgatccgcccaccttggcctcgcaaagtgctgggattacaggcgtgagccaccacacccagccagaatagattattttcctaccaaatcctgtcttctggatttgaaataagaaaatatttggttaagaggtgtaaataactgataatagcattagggctgacttaattaattaaatacgcccagaaagcccaagtgggaggatttagttgaggaggaggaggagttttccaacagtccctccacctgggcaccaggtgtaagcctgacctgtgccgtgtacacagtgctcattcgtgccctgagacaggaagctacagagatccagaccaacagctcacagtaagcttgggccaggtctggcgggaagaacagagtaggcaacaagagctggacactgtttaatgattagactgttttcctctttgattttggaagtgttctacaaaggtgatctgttaaaggttggccctgtggttattgaaacccaaagcagagtgggcccagcctggcctaggcttgagaggaaacaattgtaaatcaaagacccactgtgtcctcaaaagcaaaaatagctgaagggttgatgacaatccttggcttggtgaatctttcattaagaatgctctgagtaattcttgcttagccagcagctctgtttgaactctgccaggtgccctggctgctcacaaaccatgtcatgtgacmtaagattaggaagcttttgacacaggcagtctgtattgcttgtccaggaagggctgtagtggaaaggtatgaagtcccaaagacttgtccagaccaggtctggaactaggggccagtgatggaagtaggggatgcccagtccgctgtcttatctttcaatcaacagggactttacttctccagttagactgcagtcatatcaaagcattcattcccatcctttgaaggagggacacaatcaatttagaatagaggaattttaatctaacttaaaagcataatactatttgattataaaatatattgcatgtgccatttggtaaatgaaagttaaatttaccttatttattgatgtttttctttttctttttyttgagacagagtcttgctctgttgcccaggctggagtgcagtggtgcaatcttggctcactgcaacctccgcctccctggctcaagcaattgattctcctgcctcagcctcctgagtagctgggattacaggcacctgcctccatgcccagctaattttttttgtatttttggtagagacagggtttcaccatgttggccaggctagtctcaaactcctggcctgaggtgatctacctgacttggcctaccaaagtgctggaattacaggcgtgagccactgtgcctggcctcattttttaagaattgctggggtaaggggaaatgagaaggtgggatatgggcaatgctttttgttgttgttgtttttgtgtgtgtttttttgagacagtcttcctgtcacccaggctggcgtgacctcagctcactgcaacctctgcctcccgggttcaagtgggggtcctgcctcaggctcccaagtacctgggattacagttatgtgccaccacagcccgctaatttttgtatttttagtagagatgcggtttcaccatgttggccaggctggtctttaactcatgacctcaagtgatccatctgcctcagcctcccaaagtgctgggattacaggcacgagccactgtgcctgacttttttttaagcctttgcaatgtggtctggctctgtcgcccaggctagagtgcaatggcatgatcttgactcattgccacctccacttcctgggctgaaaccgtcctcctactgtgtccggaattggtgggttcttggtctgactgacttcaagaatcaccctgtggaccctcgtggggagtgttacagttcttaaaggcggcgtgtccggagtttgttccttctaacgttcgaatgtgtttggagtttctttcttccttctggtgggttcgtggtctccctggctcaggagtgaagctgcagaccttcacagtgagtgttacagcacataagggtaatgccagtgtggactcaaagagcgagcaacagcaagatttatggcaaagagcaaaagaagaaagcatccacaacacgaaagaggaccagaaaggactgccaccgctcgctcgggcagcctgcttttattcccttatctggccccacccacatcctgctgattggtccattttacagagagctgattggtctgtttttatagagagctgattggtccgttttgacagggtgctgattggtgtgtttacaaaccttgagctagacacagagtgctgattggtgtatttacaaaccttgagctagacacagagtgctgattggtgtatctacaatcccttagctagacataaaggttctccaagtccccaccagattagctagacactgggtactgattggtgcctttacaaaccttgaactagacgtaaaagttctccaagtccccacctgactcaggagcccagctggcttcacctagtggatcccgtgccagagccgaggcggagctgcccccgggtcccgcaccgcgcacctgcactcctcagcccttgggcggtcaatgggacagggcatcacagagcagggggcggcgcccatcagggaggctcacccgtgtgggagcccaccgctggggggctggggcatggcgggctgcaggtcccaagccctgccctgtggggaggcagctgaggcctggagaagaattcaagcgcagcacctgcgggccggcactgctgggggacctggtgcaccctccgcagctgctggcccgtgctaagcccctcactgcccgggcctgtggcaccagcctgccactccaagtgcggggcctgctgagcccacgcccacccagaactcgtgctggcccgcgagcgtcgctggcagccccggttcccgcccgcgcctctccctccacacctccctgcaagcagagggagctggctctggcccctgccagcccatagaggggcccccacagcgcagtggcggcctgaagggctccttgagcatggccagagcggatgccaagtccgaggaggcgctgagagcgagtgagggctgcgagggctgccagcacgctgtcacctctcactacctcagcctccaaggtagctgggactacaggcatgtgccactatgcccgtctaatttctttttttttgtatttttggtagagatggggttttggcatcttggctatggctggtctcaaactcctggcctcaagcaatcctcccacctgggcctcccaaagtgctaggattacaggcatgagccaccgtacccggccttgatttttaagtgtatttcatcttgtaagaatgtagagatgaagtggctgcattctcctgtatcattggtagttaattcttcttcttcttctccttctcctccttctccttcttcttcttcttctttcttttttttaaaaacagactctcactctgttgcccaggctggagtgcagtggcatgatctcagctcactgcaaccccccgcctcctgggttcaagcaattcttgtgcctcagcctcccaagcgtgtgccaccacgcctggctaatttttgtatttttagtagacagggggttttgatatgttggccaggctagtctcaaattcctgacctcaagtgatctgcccaccttggcctcctgaggtgctgggattacaggcgtgagccaccacgtccggccggtagttaattcttatttcttaaaaaagctgtatgtttcaggctatcttctgaggagactaagaaatcatatcagatttatgctccttgttgacagaagttttcagttttctatttcttctctgctgactttagggtccagtttgatcttccattgagtgattgattgattgattgattgagacagagtcccactctgttgcccaggctggagtgcaggggtrtgatctcagctcacagccaccaccacctcccaggttgaagcaattcttgtgcctcagctttcacagtagctgggattacatgcacggggtaccacgccggcaggtccggctacttttttytagtttttgtagagaccaggtttcaccatgttggccaggctgttytgaaactcctgatyttaagtaagtgacccgcccacctcagcctccctaaagttttggkattacaggcgtgagcctccttttttttttttttttttttttttttgccttctcgttaagattgtgtggctggccgggcacggtggctcacacctgtaatcccagcattgtgggaggccgaggcaggtggatcacttgaggtcaggagttcaagaccagtctggccaacgtggtgaaaccccatttctactaataatacaaacttaggtaggtgtggtggcaggcacmtgtaatcccagctactcgtgggggccggagacaggaaaattgcttgaacctgggaggtggaggttgcagtgagtsgagatccagcctgggcgacagagcaagattccgcctcaaaaaaaaaagaaaaaagaaagattgtgtggctgttgcttccttcaattktatctttctctgcttgttgctataaacttggtttaggtcaatgtcagaaattactgttggttcctaagtgatgttttctgatgccacttctaacatcaaatatatgttctctttttcaataccaatcaataccaactaggtgcccaataattcaattcaattgtggcattagctcccggagttagtggaggccccgtagtttaaagctcagtcccacaagactgccctcacttcagacgccagccaggcagggcatctgctgctggcyccaaggggacccacacctgtgtctagctgactacaaatyccaaggctcccatgatccatcctcctcaggttctataatcagctagaactactcaaagaactcaggggaacactctacctcagtttactggtttagtataagggatacagctcaggaatggccatatggaagagacatayggggcaaggtagcagggtggtgcagagcttacaggccctctccggtcacaccaccatccagcacatcagtgagttcaccaacccagaagctcttgtcttgttrtagagctcaatttccagccccattctccctcccaaggttagaggtggggctgagarttccaaccctctaatcgtagtcacrtgtttggtttttctggtgaccagccccctcctgaagccatctagggatcccaccttgagtcaccttactagcataaactcagggactcattatgaaaaacaaatgacacttccatcactcaggtaatcccaagagttttaggaacttggagctgggaaccaggaacaaagacagaatatgttttatattacaccatggtttaaaagtggcatttaggctgggtggggtggtttatgcctgtaatcccagcactttggacggcaaggcgggcagattacatgaggccagcctggctaacatggtgaaaccctgtgtcaactaaaaataccaaaattagccaggcatggtggtttgtgcctgtaatcccagctactcaggaggctgaaatggggaaatcgcttgaactcaggaagtggaagttgcagtgagccaagatctccccactgtactccagcctgggtgacagagtgagactcaaaaaaaaaaaaaaaaaagtggcattaaaaaattatgattctgcattattgccctggtttgtttctggtctttgacattgcatcatgctccaccttctctataggcagggttggattatggttctgggttttctgatttggaagtttaggtgatgttacattgttagaattagaaagtaattgagatttttgggcattttgaaacttggacatttcttataacacattcttttgtgtttgtgaagttgtttcttatagttggaaagtgaaatttgactgcaaaggccaggacattctgcttcrtgactattaatgaygtcaataaatctggttcagaggactttttatttataaatactgaatccaggaataggctatggataattaatgaaataaagcagaagtagccttcttggctgagtgagggaaatatttgtgtaaattttcaagagaggaaccatgaagtattagactggaagggagctagtgaagtggctacattgactggcgtgtatacccatggtttatcgtgttgcgccaggaaaatttaggacayggacacacacaaggagtttcggagtggaggtttaatagacaggagaaaagagaaagaaaaacaactctctctattgagagagaggggtcttctgagtggaaagacgyggccggtggtggatatgtcagattttatagtcaggttggtggaggcggtgtctgatttacatagggctcacagattggtttgatcaggtatgatgtttacatagtgcatcaggaaggctggcctccccaccctcatcttattatgcaaatgaactttccccttagttggggccatcttgtctgctccttactgtacacatggctgacaaagcaaagggaaaatggagccgccatcttgaacatgattgccagcatctatgtctgcagctcgattttacaggctgcttttgttagacaggaaaatgatttggggctgcttttcattaaaaggaaaaccttaccgaggacttccataccctcactatctgcctaagtaaatttttcttaactcttgtatcacttggaggccaaataacctcagacagggtggctggaaaccagaaacttagccaggcctcctcctagattgctcctcctgcccctgccccatggggcgcttcctatggggcttttcccatggagatagatatagtgtcaggaccatgaaaaacatgatttttcttttctggaaagtgagaagttttgctgtgattctatcattctgtggacatttagaaagaaaagcaggatgtgatgactgggtacacaccataaaatatcttcttccttccgtatgaaacatcaatatcttacttggtgatttcttcttctcttcaatctaaaaaaaatctatttgagtaatttttaaaatttaaaatgtacagtgtattaaagaaaatttgtgaaaagtacatacaaagaagaggraaaataattataatcattaaaaccattgctaatatttaggtatcagtatcatgaaaaatggtttcccttttctgggaagttgtagaaagtatatcttttttttttttttctttttgagacagagtctcactctgttgcccaggctggagtgcagtggcgyaatcttggcttactgcaaccttcgcctcacgggttcaagtgattcccctgcctcagcctccccagtagctgggactacaggtgtacaccaccatgcccagctaatttttttttgtattttagtagagacgggatttcaccatgttggccaggatggtctcgatctcctgaccttgtgatccgcccgccttggcctcccaaagtgctaggattacaggcgtgagcyaccgtgcctggcctatttttttttttttycccgtttaacattatcacacaagcattgttttgttgctgttgagacatattgttctaaagatcatagagatagtatggtgtagtggtttaaagtagaggctctsacaccaaaatacctgggtacaaatcacagtccacccatgggctatataactttgagagtcacttaactgctatctgccttarttttaccatctgttaaatgggaatgatggtggtagccaactcacaagttaaatgcttatgtaaaggactttgtaaatgttaattatcatctaaaggaagattttattaatattaattttatttatttattttgagacagggtctccctckcttcccaggctggagtacagtggtgaaatcacagatcactgtggccttcacctcccgggcttgagtgatccttccacttcagccttggtagtagctgggtgcaccaccatgcctggctaattttttttttttttaaatagagttggggtttccccatgttttccatgctagtctcaaactcctgggctcaggtgatcccyctctctcagcctcctaaagtgctgggattacaggtgtgagccaccatgcccagccaatattaatgtatgtgtatagtagagacttttataaaatacataaaagcagaagaaatcaaaatcactcattattctaaaacccagagaaaaccacttgccagtgttaaaattttggctttgttttttctaatatatttyctcttacatagttgagagaatattgcatttctaatttgtatcctgatcatgatgtaaacattttttatttattttattttattgtttttttcagacagagtctcactctgtcacccaggttggagtgcagtggcatgatctcagcttacttgcaacctctgcctcctgggttcaagcaattctcatrgctcagcctccctagtagctgggattgcaggcacacaccaccaygcctggctaaaaatttttgtatttttagtagagacagggtttcaccatgttggccagggtggtcttgaactgctgacctcaggtgatccacctgccttggcctcccaaagtgctgggattaccggtgtgaaccaccacgcctggtcatatatattgtttatgaacataattttaaaagacttcagaaatcatcttgtgttccatattttagttaacctttccccagtgttttgatatttgcattgctctctgcccccatattaaagtggtgacctgagccttccctggcccgtgtggagcctgcattttttttttttttctgtccccaggacataattagccctaatccacaaaccaattagtagaggggtgaccagattatgaatacatttgtgaaaaacatctttgtagtggtttttcttcttcagtattagaggttatttccttagattagattcctagaaatggaaatgcagggtcaaagggtaagtttccagaagggttttattgactctagactcctggaaacactgtatgagcctgtcctacttaccgtgggcctccaaatccccttcctacagctctaggttgcttctcagatctgaaatattgaagaagttgtcggggcaccaaaactctggaattaagttaatcttaacagcccctcagctcctctttcccattccctattatttttccccctctccaaggcctttctttctttttgtagytcctctgccctgccagctttctctaatccccttgtgcaggcttcctcttctccagtcgggaggatggaaatgatataattaagtcattttattaagwagttagtaaccttagcagctagaagtgttagtccccagctggacacttgcattttaataaagggttcttggagcagtggtgaaccctaagaactggacttgacggtaggatttggggcactgtcatacccagggagggagatatcatgagccggrgccactcaaggtttacaagtrgatggagtcctggatgtcaggccagctttgtgtgtggggtaaagcaaaggtcagtctttgagaagccttaatttcctctctgccaaagcactaactgctsagagtagaaacaggttttcttaaaggtaaagtgagtctctcggaggaactattaaggagaaattgtttactgaattggatgtaataaaagactagtcagcagcatatrcagattccttccataaaatataaytttatgataccaggcagggctccttttatggctttctaaaatcrtttggttgaaattgctagaggtgtggagggccttcacttgtgtgtcggtagccagtgatttgattacattatatttccctgggcaagcagagccaggaggcctctggatgggggctgaggccttgattgccctrgtgggtactctgagttgcagaaggtgggtttcttgctagacggtttctgtttcaacaaggtctcaggtgccttttactgcaaggaatgttgtaggtctctaattgtggactcgtatatcagttttaatggactgaaaatccacagaaagcactggggagtgtgcctccgtggagaatgggccaacagctggatacaaccagatggtgccctagatcttacggatggacaaggatgggtacagacaggttattaggaaggacttaaagagttggggaacctgrttcaaacaaagtcctcgatagcctgaacgtaggmggaaggggagaaatggtaagtgtagtcaaytgatagctaccaattgggtgctctcaggagaccttgggaccayagccagtggggaaagtggtcttgagagatgatggggaccagctggagcgggccagatgccggcctcccttcctcctggaaagaaaacgcttcagtcccacgatggkttctaccttggcactcacagccctgtctcttcccttccagcctgatcctgcctgaagatggtgccactggtggctgtggtatcagggccccgtgcccagctctttgcctgcctgctcaggctgggcactcagcaggtcggcccccttcagctgcacaccggggccagccatgcggccaggaaccattatgaggtgctggtgctgggtgggggcagtggcggaatcaccatggctgcccgcatgaagaggaaagtgggtgcagagaatgtggccattgttgagcccagtgaggtaagcctccccttttgagggcctgggtgtgtgtgtacgtgtgtgtgtgtgtgwgtgwgtgtgtgtgtgtgttctggggttggatatgactatcaagcaatgggtcttcatatgttcaggttagggcttctcctgggcacagaaagcagcctatccagaaggactgggaggaagtggagggaaagagagagggagracagatctcttggcttttagtgttctcctctgtattagtttcttagggctgccataacaaattactgcaaattgggtggcttaaaacaacagacatctattccctcacagttctggaggctagaagcctgaaaccaagctatgggcaaggccatgctcyctctgcagcctgggtgagagggatgggcaggtggctttgtctcatgcctctctcccagcttctggtggttaccctgaaatccttgccactctctggcttgtagctgtgccactcctttctctgcctccatcttcacagaatgttctctgtgtgtctctgtgtccctgtgtcttcacatgacccttttataaagccaccattcattggatttatggcacactctattcaagaatgacctcatcttaatttgattacatttgcaaagaccctatttccaaataaggttacattcccaggtactggggttagaacgtcaacatccttctttgagagagatacaattcaacccatgacactctcccagtgccaacctcctgcccagaggaaaatcaatggccactgcacttgcctatctgttcctgtctggagaagggatgatgagttggggagcaggaaggcctctggaaagctgtcagtgggcttagaaatttaaatgcaagggcagattataagggagaaaaggtagctgacactaggagggaagactgagtaaggcgctgtctcacaaaaaacatgttaagattgtccaaaagcttcagaaaaatattcaagatttttggtggtttgcctaatgtttcctgtggaactaggcatgtactggttgggagctgtatccttgggaggaaaaagcaaaatggatcaggtgcctgtttcagggggaggacaggacaaggaagacatactccttttcaagatttgtccccagcagggaatgatgttaaccagggccatgatttgagaggaaactagggggcagtctctatcattttcctttttaaagtgacgtctgttcaattcaggaacctcactttaaatgacagtggtctgagagctgtgtcaggtggctactgtttctggtatatgttgtattttagctaatgcgtgggcgggtctcccagtcaggcttctctttgtaaggagactggctcttctgggacctgggcacaattcaggcggccagaatcaagtttgtcctgccccgtgaggaagtacaggacaggaatttctggaaggagctgccagagccccaggcttggtactttccctgctgagtctgatttagtgatagctggagctgatgttcatagtctaaaaataaaatctgagcttgtatttttgctcctcttactgttcaagatagactggccattgatgagctctcataaatggagacctctgtcttcctccctcttggatcacattattgcttgtagggagattgcaaagtcattcctggtgtcctcttcacctctctgtgggttttggcagtgctggccagctactttgaggcattttggcaatattgagagctcttggtccccagtctactctaagtggattggaattcttagaggccattaaacaaatctgccctttgcccctatgtccagaacttttacaactaacttagatcaagaatggactgttgctgggcacagtggctcagggctgtaatcccagcactttgagaggctgaggaaggcagatcacctgaggtcaggagttcaagaccaacctaggcaacatggtgaaatgccatctctactaaaaatgcaaaaattagccaggcatggtggcacatgcctgtagtcccagctactcaggaggctgaggcagaagaatcgcctgaacctgggaggtggaggttgcagtgagccgagatcgtgccactgcactccagcctgggtgattggggtgattgggcgagactctgtctwaaaaaaaaaaaaaaaaaaaaaaaaggaccatctgaagcaagaaaactccagaagatagtgaaagtttgggtatgcattgcattgtggagtaggatctggtacttattgtctttggtgtaaaatctctgagtctctgagaaagtagaagaagggctgttcaggaaacacagccctcactgggcttgggaaacacagttggaagttaatgaagtttagaggacctctggaaggggctgtaaactttccagacttaccactgtctccacatgctcctgaggaaccatatctaggctgctgggcttaatttttaaaatatttgttcacatgaagtatccataatatgtgtgtagatatgcacgtgcatataacatgtacatattaaacaccaaatcaactttcagcaatacataatgcagtggtcactaaagatagtttatagcttttctgatgatcttggaagaattcttgtgtggagtgactgtccttcagagcttaccataataggagacgcctaatagacggagctaactttgtggagacttttccatacgatgctctaaaggtcaggagggagtgattgaaagaatctagcccatactgttagctatgaccccttttgatcagtgtcaaattgcaataaatcttcaaatactttgtttctcagagacatttctaccagccaatctggacactggtgggtgctggtgccaaacaattgtcctcatctggtcgtcccacggcaagtgtgattccatctggtgtagaatggatcaaagctagagtgactgagttgaacccagacaagaactgcattcacacagatgacgacgagaaggtaaccactgaggcctttagattttttgttaatctgacagcttgtattaatatgcagccatcttaaactggatagccttgtgttgaaagagcggtatatatgcatgtgtgtgcatgaacgtatgtgtgttgaatactacacaagatggcagggtatgtggtaagtggaggatagatggaaggactgagtgatattgagttaataaacaactaagataagtatttgttgaacacccactgtgcaccctattgcttagtatactatcttgcacctgaatgtttatcagaccatttgtttatacgttgctacatgttaaaatagcaagcaccttcctccttctctttttctgaagcaatcagattttctaccggtcgcctagcctcccagaacaataggatgctggaaaatatccatccagccaccctggggggcgctctaccagaactgtaggggaatcctgtgactctgaggttcatgccagcgctaaggagaattgttgctggagcttgaggctcacaactgctcagcaccttttagaagtctcccaccctcaccactcaggggtcaaagcttttcagcagtggccgccccatgtttgactgaggtgataagagcaggatggtggaaggcctgctcagaagccatctgcagctttcttttcccccacctgctgctgagcccagggcaggggcaggcagtgcagccaccgtgctctgacctgttccaggctcctgtggtttttggactcacaaggtgttattggtcttaatcctctgccccttcccccttcaactgggactctggcattttcacggaattgtagaatcagagttgggtgaggatcctaaaacgttttcaagtccaacccttcctccaacagagattcatctgctgaggcattattttttttgagacagagtctcactttgtcacccaggctggagtgcagtggcacaatcttggctcactgcaacctctacctcctgggttcaagcgattctcccacctcagcctccccagtagctgggactacaggtgcgcatcaccatgcctggataatttttgtattttttggtagtgacggggttttaccatgttggccaggctggctcgaactcttgacctcaagtgatccacctgcctcagcctcccaaagtgttgggattataggggtgagccattgtgcccggcctgctgaggcattgttaagctttttttgggtcatggatctttctgggtaccagatgaaagccctctctagaaaaatgcacctatgtatcagattttgcatttgcttttagggagttcagagattttctgtagcttttccctggaccctgatcaagagtacctgctttggctgagcatggtggttcacacctgtaatcccaacaccttgggaggctgaggtaggaagatcacttgagcccatgaggtcaaggccagcctgggcaacatagtaagaccctgtctctacaaaaaaaattaagacattagctaggtgtggtggtgtgtgctgtggttccagctacttgggaggctaaggtgggaggatcacttgagcccaggagttcaaggctgtggtgagctgtgattgcgccactgcactccgtcttaggtgacagagctgtctccaaaaaataaaaaaataaaaaaaacacaaaaagaaaaaaagagtacctgctgtatagcatttatgatccttggctttctggcctccattcattcattctacaaatatttattaagcatctactataagccaggtgcagttttaggcattaaggatatgtgtagtgaacaaaaacagacacaaattcttattgaactggatattatattctagtcagggagaacatacaatcaacatagacatgataagtaaattatatagtatgttagaatgtgatggttattcatgaaaaaaaatagagctgatttggagctaattggtattggggcacatggaggtgggggattgaatttaaaataggttggtatttacatagtccatggccaaggagttctctgataagttaactcttcatctttttagacacgtgggttatatgaaagttctgtcttcactgagccagaatccaccttcctgtaactttttttgtattctttcttggacacccaggatgttattgtttttaatacacttaatacctttcttaatacttttattccttgttttgtcctgttgtgtatgagagaagaatgtcttctctcttttctgtggagaaacccttcagctatttgaagatggctcttatgttttatgtaaattttctctaggtatatgtgtcccccccatcctcatgtccctcaattcttcctcacatttcatggtttccagtccccccagccccctctttattctgctttaaacaccatctggcttgttagtgccccatgaaagaggtgcctggaaagaaggcaactttacagaacagcccagaatagcgtggagccattctctcccatgatctcatgctgcataagttagcatttgcctttttcgtgacagttaccacggtgctgattcatgctgggcttgaggtcggtgcaaattgctgggcccttttcacatgacccacgatcaagtcaggcttcccccatcctgaaaaagtatagttgttattgattttacctaaaggcagaaatgaatatatataagcaaatacctatatgcatatatatttattttaattaaaatttttatatatggcttttgtcctgttactagttcagaactttcttatttttctcaatgtctccgggagaccagactgaattacactcaagattgttctcaatcacaaggttgagcttggtggctctcttaccttgccagtctcctgaacacagggccaggagacctctctcatatcacacacagcatctctttggtacagcagggcctgcctcattgtttggaccccttcaagctacaggaagagctttagagccttcggtggttgggttcatgctcatctcaaggaccatatactttactcatctcttgggaatgacaggcactactaggtgttctcactgctgagtcctacctattactcctaaggttagacacttaggaaagctgtagtgtcttgttttagggcagagaagttggtgcaatgtagtgggactttcttccaagattttatgaagcaaaacgacttcatagccagatatcagaaatacacatgacatctcatgtgagaaatcatcctgctggttttaattcatcctcccaacacatctgggtcttttggatttatgactctgtcaatccattagcaatttttctatctgttattcacaggtggtttcatataagttcaaagttttaactctgtaacatgtcactagagagcttttttagattgcacaaaattagtcaacatttctttagcaaatattattcaagtgaccaaatcattccattctgtcttttttttttttttttggagacagagtctcactcttttgtccaggctggagtgcagtggtgtgatcttggctcactgcaacctctgcctcccaggttcaagtgattctcctgcctcagcctcccgagtagctgggattacaggcatgtgccaccacgcccagctaatttttgtgtttttagtagagacagggttttgccatgttggccaggctggtctcaaactcctgacgtcagatgatctgcccacctcggcctcccaaagtgttgggattacaggtgtgagccaccgtgcccagcccattccattcttagtttacactttcccaccttattggtgaaagactgagctgaaggcactgttgaaacccagactcagtgtgtctctgattcttccctgatccgggggtgtgtttgtctgaaacacatctcaaggccctgtgtagactggtccttgctccttctccaggcttaacctggttctattctctccttgttcctgctcctgccatactggcctcctatttcctcaaatgcctcagcctttttcttaccccaggacatttgcacatgctgcttccacctctatccctagctaactgctactcatctttagcttcgatatgactccttcaggcaagccttccttgacttcccagactaggtcaggttatcccttgatgtgctatcacagcattctgtgatttagtaattatttgtgtcattatctggtaatgcctatctcactcactagatggagttcctgaagggcaggaagtgtatctttcttgtccattgttttatgcccaggacctagcacaatatctggcacatagaaggtgctcagtaaatatttgtgagcaaattgtgtctgtttcttcatttgtaaaataataataataatagtacctagataccttatgaagttgttgtgagtgttaaatgaatgaaaccatatgaagcacttagaacagcaccttgcacagagtaaatgctcaataaatgttgctgttatttttaaaagaatacataaaaaggaaaaggatatatttattgagtatctactatatgccagcagttcttgattgctgattgaaagcagcaggcttatcatctgtgaacctatgttggtgctccttttcctctcccctccccttccctcctctcctctctcctcccctccccttctcttccctcccctccccttctctcccctcccctcctctcctctcccctcccctcctctcctctcccctcccctcccctcctctcctctcccctcccctcccctcccctcctttctcctcctctcccctcccctctcctttcctttctcccatcccctcccctctcctctcctttctcccatcccctcccctctcctctcctttctcccctctcctcccctctctttcttccttctccttccccctccctccctccctcccttccttccttccttcctttcttccttccttcctctctccctcccttccttccttcctcccttcctctctttgtctccttcctccctcccctccccttccctcctctcccctcccctcccctcctctcccttcagccttgctctgttgcccaggctggagtgcagtggtgagatcacagctcactgctccttgaactcttgggctcaagagttctgagccgatctaccttagcctcctgagtagctgggactacaggcacacactaccatgcccagctaatcttttaaaaaattactatgaaatgtctatttagtagttgagtctagagttttgcaaaggattaatagcctatttactaagatgttcgtgtcagagtttacgtcttctgacccctgtgtaatatgagaatacttgcagatattcagccttctggcaaggtctacactgttgtgcgtaactgctcaaaagtcttgtctataagcttttgctgttcctgggggtttaggtcatctgacctgaaaacttgaactcattcaaaaggcttgaggttttcttcttgctttcttgctatggagggtttattctctcttaatgattttttccccataatcttaagctggcatgtttttagtccttagacataatgaatattatgctctaataaaatagagcataatcaatattatttgcatcatgtttggtggtggcctgcacaaaccaaaagctcctcttgtttccagtggtcatatgtttcacctgtagatcatcactaccagaccccatgctagctcttacctaatatgcccggattgctcaacatggtttggccggccatttaacgggcctggtgccctttcctacagaagatggaatttcaatacatcatctttctttatttctttctttctttctttttttttttttttttttttgagatagagtctctcactgtcacccatgctggagtgcagtggcgtgatcttggctcactgcaacctctacctcctggattcaagcaattcttctgcctcagcctcctgagtagctgggactacaggcgcccgccaccatacccagctaattttttgtatttttagtagagacagggtttcgctatgtgggccaggctggtctcgaactcctgaccttttgatccacccgcctcagcctcccaaagtgctgggattacaggcatgagccactgcactggccaagacatcatctttctatggataggcaaaacatacagatgaaaatgcttatattatcttccacttagagaaattgtacttttcacaagcaactgaaatcattcatctatccattcacccaccaaacattacagagttcctcactttaatttagtgactgtgctagattctaggaatgtaaggaataagacataacttttatcctctaggagtggtcagtgtgctggggagaacaagtgctaggaagcctcatgcacactatgctggggagctcctgggaggggccagtggtgagggtgatcgtgtcatagtgggaaagcctgctgtggaggtggctttggggctgaagctcccggatgccagggcagggcctcttgactgcacgttacttcccttggctcctcagccagagccaagcactctcaggtcttggagtcctctctctccaactgcgattygctcgggttgcttgctctgctctgccatttagtacaggatcatggtaatcaccacctgtttcttctttctgggctcctgagtctcactgcaatcatttcctaactccagttttctaggcaagttcttgtactttacggccactttgtttacactttttggcctaaacttgtcttcctctttgtcctaaacccacatttccatcatgctacttatgcatacaatacccgtatttgaagaagggacttttttcatcccatacaggtcattaaataagatcaggtacactatgtcatagcctttcaatgaccttgagattgctcaaaagagcaatctcccaattacgatattggtccaatccacatgacaggtcagacttgcttgggactcacatattacccaatagattttagttttttatttttaatatacaatatactaatatatattttttatatatatattttttatttttttttaatttttttttgagacagggtctcactctatcaacaaggctggagtgcagtggtgtgatctctgctcactgcaacctccacctcccaggctcaagcgattctcccacttcagcccccctggggactacaggtgcatgccaccgcacctaggtaatttttgtattttttgcagagacagggttttgccatgttgcccaggctggtctccaactcctgagctcaagtgatccacctgcctcggcctcccaaggtgctgggatgacaggtgtgagccactgtgcctggcctaccccatagattttagacagtggattgtcttttaagattaggaagcccttctcttacctctcaatatgaaaaagtgttaatacaagcactgtacaaataattgtggcctctcactgtgtaaacacatagctgtctcaagctttctggggctaggcagcttacaaaatatttgtgaagcagtgaggtgtgaggcatagacggcagagggcatgatgggagtggacacgcatccctccctgccagtctgcccacctcccccagccccaagacattcagattaaaaaatgggaayctgggcaggactcccaaccttgttctgcttcgattttctcatctgttctatgggctaataatatttccctgcctcccttagaccacrtggaaccacatctggggcctgagtcagtccttgagttgatgcttcttgagtcctggtctaaaataatgtctttttgtgttgcagatctcctaccgatatcttattattgctctcggaatccagctggactatgagaaggtaccgtgtgaaactgtttctgtgttacgctggcttatctatgccaagagcaaatgctgcatttagttgctttattatattcattttgacaagaaaggggttctaagaaaatctcttctggttttatttcttggcagtccttttacagttttaaggaagtcttctctaagattctgycgataataaccatatgttctagctttaagctttaattagagttcagcatgctcatgccttaatgattaattcttgcaaaacagcagttttctttccacatttgtaagaaacatgtctttctatgtgggacagagttggctgtattgaagattacattccgctttggaagtagggtttagattataaattttaaagcagactttaaggggtggaacaccagcagttagctcgtctgttgctggagggacatctgggttttgttgtgtcgatrctgggtttttagtgtgaagtaaccgatgcaatggaaatgccactcagaagttcctcagatccccgttttcagtgagctagggagccagatgcaatttgaaagttttgagattcaacttcatttttctaaaacatagcagagtaaatcggtaaatattatcatttccagaaggttgttggggactacagataaatagttggagtacaggaaacatctgtgctaaccgggtaacaagcttcaggaatgtgacctgggcaagggcctcaacagagttggcccagtaagaatctttgaagtgtgttgaattgtgtcatgtccaggggaagggtagtgaaaatgtcttgggttgtgttgtgggaaagttcagagaagctacaagttgttgtgaatgttgtaagatggttttgagtcatggtgccatgggtcgtgagtctgttagaatgacagacaagctatgaagtagacgatatggagaaaggtgtttattacaactactttcaagggggccataccttccaaaaaggcccccacagtgttgacctagcaaaggcaatgcgtctccatggtactgtcttcccaaagccccagtgtcatgtgagaagcactgcagaggccagtgctcagagttcatagcagcctcttgtagcaaaccaagtcacagagatatttaaaagtagccattattatggaatctctattacataccaggaaccatggtaggaatcaaatattgtttcttttttcttttgagatggagtcttgtcaccgaggctggagtgaagtggtgtgatctcagctcacttgcaatttccatttcccaggttaaagcaatctcctgcctcatcctccagagtagctgggattacasgtgcccaccaccatgcccggctaatttttgtattttttttagtagagacggagtttcactgtgttggtcaggctggtctcaaactcctggcctcaagtgatccacccgcctcagcytctcaaagtgctgggattacaggcgtgarccactgcacccagccaggaatcaaaaattgattctttacaactacttgtgagggaggcatttttatcttcacttaatagatgaggaaactgaggctaagggaatgtaataaccatggtcactgtgctacttgggactctttgattgcaatttcaaggaaactactcaggttggtgtaaataaaaagtagagatcattgatgaaaatactgagatgtttctagaacactagggcaaggatgtagctgggcctctggcagggctggatctccactttgggttctgttggactcaggcagcctctctttgtccatctctcttagcctctttctcaggccagcttcacagggtctctgcagcaggccgtcctgcctgccggtctactctgtgtgataggatagtccacggctccccagtgcacagcctgttgctggaagccaaaggaggagtcacatctcatctctttccctgactctccctttccctctctcccctcctctctagctctctctgcttcagaattcccagggaagcaactctgactagatgaggggtcaaaaccaccctttttgacgcaggttttcctgaaaggagcttggttaccactttacggcaacttttccatcaacgacagcttcttaaaactagagaaaactaatgaaggtgataagacatcaactgcttgtttctgcttgtttatctcttggatagtgagatttgctttgggaactagaaggtatggcggtcctgtgcgaagacccccaggcaggtgggcagaggccttggtgtctggttctttaagattctgggcagggctccatccattctaggggttaatattcccctgcctccctcagaagtacatagtgaatatccattgttagcattgatgtgaaactttgaaaacatttaaatgcaaggtgattttataataataatgatattattattgagactgccaatgttactactatctaactgtaacaggggtgaacagtaacaaatagttgcttttaacattgagtgtgataagtaatgaactcaggccactgaggagatgagaggactctgtttccttgagacctcagggataagtgtctggagtgactttggaggtggcccagagaatgggctggggaggctctgaaggaccaggccatcttgatgactgtttcttgatgattgaagttgaacctgctcttgctgagaactgaggcttaagtctctttaactcagtctgtgacatcttcattgcactctacgagccttctaacatttataataggtgtctagttgatcttattggcaataatcagctaacatttacaggacatttgccatgtgcatgtgtcctgtacatgcatggcctcatttgcttctgcctacaaccctgtgaagcagataccttatccccatttcacagatggtgaacgttaggattctcaaacctgagtgtgcatctgaatcagctggagggcttgttaaaacacagattgctgggcctgctcccagtttctgattcagtaggtctagggtggggcctgataatctgcatttctagcaagttcccaggtggtgcttgtgctgctggtctgagcaccacacttggagacctactggcttagaagtattaggtaatttacacagggtcacaatgctagtaagtggaagagccaggactcaaactggtatgtgggatcctaaagtccatgtttttaggcacctggctttagtgcctttatctagagtttggtctggtacaacctgataaagagtgatttaagtttgctattcttgatgatataaatggctcttggtcctgccagttgttctttccagtgaggcaactgggtctcctaaaaggaaggctggctggcgtcttgtcctcactccgatggtgggaaaagttgtattcaaattgtattctcaaggccagggagttgaagggttcctctgagctgagcccattctgcagtttgacaggtgactacaggtgccacagctctggtcttagaaccctcacccacctgcctgctctaggcatgtgggtattggagggtaatgatagtactgaaatatttgaaaggttgtagaaatggcaaagaacaaggactctaaagacatttgcacttttgtttaaaataatttttgtgtactttgttgcagattaaaggcctacctgaaggtttcgctcatcccaaaatagggtcgaattattcagttaagactgtagagaagacatggaaagctctgcaggacttcaaagagggcaatgccatcttcaccttcccaaatactccagtgaagtgtgctggagcccctcagaagatcatgtacttatcagaagcctacttcaggaaggtatgcttcctttctggggacagagatgagcagggcggacagtgctaattcactgattgcaagaattccattttatctctattgtaatcccttttttatctyggaatttttattacatgtgtacaaaattagttaactggaagtttataaaatataaaagaggagaaaatcactcatgatccaattgctttaataaagctgcagttttcaatttgacatggctttccagctttttttctgtatacttaaatatggttacagtcatagtgtacatgaaaaatttagctgtattatgtaatattaaatagtctttgttacatactttttaaatgtgtgtgtaaaagtctactggatgctgggtgtggtggctctcgcctctaatcccagcactttgggaggccaaggtgggtggatcacctgaggttaggagttcaagaccagcctgaccaacatggagaaatcccgtctctactaaaaatacaaaaaaaattagctgggcgtggtggtgcatgcctgtaattccagctactggggaggctgagacaggagaattgctcgaacctgggaggcggaggttgtggtgagccaagattgtgccattgcactccagcctgggcaacaagagcgaagctccgtcttaaaaaaaaaaaaaaagtctactggagagatatgttagagactgtttaaatatttccatatagttagacaattagttgcagattgttcatttttatccataatgctatccactacttccactcaagtttaaggtcatgaatattttctgtcccttgggtatacattaaaaaaatatgatacggaaaatgccaatttaaaaagcaaaaaaatgttctcatagaactttaaaccttcatgaaaagagatatttgggcaggaggagactttctcagcattctccaaatgctctctgtgtaagagcagttgtctgcagctcaagtacacctggcttaagcttgtaagggaagctgttcttgccctccctgctcttgcctggggtttgacatttagtttaccaaagtgcggtttggcttgagacagtggcaggatttctagcagctagtcgtgtatggggacagatgggaagaagggtggggaagaacgggctggggagtggttgaatgtgctcatggaggctgggactgatcaagaccttcccctgagctctgtaaactgcaacaaccctgtgaggtagggaattaaaggcagttccagtaatcatttctgaccccaagaaagttcattctgggtcataaagggctggcacagccttttgagacacttacccacctgaattcttcaaatggtgagatccgggtgagcaaatcatgaaaggagccgagcaaaggaaagaagaagaaaccagctgtttcttccgtcctggaaacttctttgtgtaactcttttctcccaagtcttagatggcctacgaggaaggttcgagtaccataagatcttaggcatttgggagaatattggcctctctgatcttaggcatttgggagaatattggcctctctgaacaatatcaagaaggtaggaactcagggttttgttgttactgttttttagtttgtttattttttttttttggagacagaattttgctctgtcacccaggctggagtgcaatggtgcaatctcagctccctgcaaactccgcttcctgggttcaagccattctcctgcytcagcctcctgagtagctgggattacaggcgcctgtcaccatgcccagctaatttttatatttttggtagagacaggcttgtctcaaaccatgttggccaggctggtctggaactcctgacgtcaggtgatctgcctgcctcggcctcccaaagtgctaggattacaggtgtgaggtactgcgcctggctggaactcagttttgctcactgctgttccctcagcacctaggacagtatctggccaactctagaactttgttaaatatttattgagtaaatgaatacatgaatatatgaataaacattccgttctactctactctgtcttgacctggacctaaccttcacctctggccttcagctggacagtgcccacctcagcccccaactcaagtgtgtacttagttgtatgtcatgggcagaacataaggaggaggcagtggattggtctacccattgctctgccaggacataatggtggcaaaagctagcaaggtccctgctgagggttttaattcttgtctggattaaaaaaaaaaaaggcagctgcagtcatgctttggtgtgaatggttttcttatttttctcagacagggaagcgatccaaggccaatatcattttcaacacttctcttggagccattttcggggttaagaagtatgcagatgccctgcaggagatcatccaggagcggaacctcactgttaactacaagaaaaacctcaytgaagtccgagccgataaacaagaggctgtatttgagaacctggacaaaccaggagagacccaagtgatttcagtgagtggtgaggctaagctgtcagcmtgaagcgttgtctgctgaaacgtgccatagatacatgggggctcacaccaccctatctgccatcattgtgtgctggggaagactgggtgaaatgagcatcttagggaagtgttagggcaagaaggtaggccaaaatggttggggaagagaaagatgtaagaggctgtgtcagtgggaggtgagaaggtgtcgttagctggtgccaagtgaatttttgtcctattcctttgactcaacttttcctggcatcgagtcacttgaggtagccaaaaatattccacaactttggttactgtgtagaggtaagggagggcttcctygaatgcaagatctggtgattgtctcaattggtggcatgtgagaaacagtcctgcttgtgagcaggaagtaaccctgtgggtagttgaagaaaacagggattggctgggcatggtggctcacgcctgtaatcccagcactttggaaggccaaggcaggtggatcacttgaggtcaggagttcgagaccaggctggccaacatggtgaagccccatctctactaaaaatacaaaaattagctgggcgtggtggcacatccctgtaatcccagctacccgggaggctgaggcaggagaatcgctggaacccagaaggcggaggctgcagtgagccgagattgtaccactgcactccagcctgggtgacagagtgagactccgtctaaaaaaaaaaaaaaaaagaaataatctcaaacttagagaagttacaaaataaaaatagtacaaagaaaattgtatgtagcttttacctagattcacttgtagaattttaccatttgctttagctttatcatttgatttcttccttccttccttccttccttctttcctttctttctttctctctttcttctatctgcctttgtctatctatctatccatccatatctagtttttccaaggaaatttacatatatcatgcatcagctctctttagccccaaatactttagtgttaattttctaaaatagaagtgttctcttacataaccacagtaccattatcaactcaggaaatttagcacagatacaattttttaacttactatttgtattccaatttagttgattggcccaactgtgtttgtagcattttttcctccagtgcaggactcaggctacagtcaggtattacattcaattgtgaggtctatttagcctcctttaatctgtgatgtttctatagcttttctttgtcttctatgaygttgatattttgaaataatacagccctctcccccaccacttttctttcagtagaatgttcctcattttgagtttgtcagtgttttcttgtgattagtttcaggctttgatatgtatttatttatttatttatttttgagacgaagtctcgctgtgttacccaggctggagtgcagtggtgcaatctcagctcactgcagcctctgcttcccaggttcaagcgattctcttgcctcagcttcatgagtagctgggactacaggtgtgcaccaccatgcccggctaatttttttattttttatttttagtagcggcgaggtttcaccatgttggccaggctggtctcgaactsctgacctcaagccatccacctgctcggcctcctgaagtgctgggattacaggcatgagccatcgcacctggcctcaggctctgtttgttagactggaacattgcataagcattgtgccattctaaggtatcacatttgcaagcatacagtgttcatctgcccttcattggtgatgttaattttgatcagcagtcaagatgtggtccagtttttccaggggataattacaatttgttttctcccttgctactaataagaagtctgtgggaagacactttaaaaccatgtaaatagtctactcattcaagtctccccactagagttagcatccattgatgatccttgcctaatcaaatctttactatggtggttgcaaaatggtgatttgctaactgtgacatttcctgcacatttaccagtaagctcttggcattctttcagcgagagtctttgcttcttagttaattaactattggtatgaactcatgagttcctatattttttcttacagtgttatcattcattattgtttttaattattatggtgctcaaattgttttggatttggtcagtagatttcccttccagctggctcttgtgtccctgtgacatgccccatcatgtgtttgagcacttcctttactttctggtgtcacaggttgtcccaggctcatctagtatctatctgcagcagctcagggtcatcattttgaatagctcctgtgtagttatgcacacagaggctactggaatgtttggagctagttatcactttataaaagggtctcaaattactgctgtttgttttttgtgtgtcctttttgtagttttcctttttcctggctgtcaggccgttgttagtgactttgggaggtccctccagctttagcttttttaaattgctgctcctcaaatggcctcactcaaatgggctatgagtgagagctcatatgagtgaactcatttttactttacaaaagagcccatttgagagagtcygtttgagtgagcccaagttgggctttcactaaaatgagctatgagtaagagcccgaagcatccttttatgagcaaagtgtatgaacttgagtgcatgaacttaactttgttagtacttcgtttcccagctgtcctctggatagctgaggttgtaggtaggggtgtggataaatgaatggttattattcttctaaggggtttgtaattaaagaagatatttgtgtcccctttgaattataggatttcaggtcagatatttagttccactcttaaaatctgaatttcaaaaaatccaccagaaggatgtaaagctgtggctcttaaccctggctacatattagggagcttttaaaatgtgctgatgcctggcctctttataagaggttttaattaattggtttggggtgcagattgaggatggggagtttcaaaaattcccctaatgactaatgttcaaccaggattgaaaacaactggtgtgaagaattgggccggacgtggtggctcaagtctataatcccagcactttgggaggccgaggcgggtggatcacgaagtcaggagtttgagacctgcctggccaagatggtgaaacctgtatctactgaaaatacaaaaattagccgggcatggtggcaggagcctgtaatcccagctactcgggaggctgaggcagagaattgcttgaacctgggaggcggaggaactagaagacactttggagattgtctagtctagtgcatttctttatggataagcaaactaaagaccaaagagatgaagtgacttgtccaaataatagcattctatttttctttgtaaatgaacctgttccttcaagccagagattgtaagcatgtgatccacagattttacatatcagaatcactagcagattttaaagtacagattcccgtgctttacccagatctactagattgggatcttggcatggtgtagcctgggaacctgtattttccacaagtctccccaatgctgctaataaacattaaagtttgaaaaccaccacactgattggactatgtatgttaatgaaggagraccaagttatttatcctatacagttacagaaataaatgatagataatgaacaagctacaactaagtgccagtgtttgtttgtttgtttttttctttctttctttttttttgtagacagggtctcactctgttacctaggttggrgtgcagtggtacaaccgtggctcatggctcactgcagcctctacttcccaggctcaggcaatcctcctacctcagcctcctgagtagctgggtctataggcatgcactaccatgcccgggtaatttttgtatttttttaaagactgggttttgctgtgttgctcaggctggcctcaaactcctgggctcaagtgatctgcccaccttggcctcccaaagtgttgggattacaggtgtgagccaccacacctggcccaatgttaatttctttttatttctttttttcttttggaggcaggatcttgctctgtcacccaggctggagtgcagtggtgccatcttggctcactgcaacccccacctcccagcctcaagcaagccatcctcctacctcaatctcctgaggagctgggacaacaggcatgtgctactatgcctagataattttttgtgtttttggtagagaggggtttgactacgttacccaggctggtctcgaactcctgagctcaagcgatctgcccaccttggccccccaaagtgttgggattacaggcatgagccactgcacctggccattaatttctaataaatccataaagtagacccttttgtaggatgttagctcaggtaaaactccatacctttatgatgattatatgaaagtatttagcttttcttttagaaaagagttgtggaatttgtgtgtacttgtgaaattcaaacacattaactccaccgagatgactctagtaaggtttagacctcagttcaaaaacgtagttctaggtcaggtatggtagcttgcacctgtaatcccagcactttgggaggctgagacaggtggattgcttgagcccaggagttcgagaccagcctgggcaacagagcaagaccgagtctctaataaaagaaaaaacaacaacaacaaactagctgggtgtggtggtgcgtgcctcctggctgaggcaggaggattgcttgagcccaggggttcgaggctgtagtgagctatgatcaagccactgtcctccagtctggcaacagagtgaaacactgtctcaaaagtagttctagttgactgcagaaatgcagacaggagattaataatttagtagatgatagctgttgaccatttcatccattatcctgcaaacatgcattcastttcaaygttcatgaacagacctgacctcagggacccatgtgcccaagagccaccctccacccaagattatcctgcagatgagcagcagccatttgcagtgctccttccctgaggttaattaagcttatatttgtctgagagttgtaataagtacaagtcatcttcctaattcccattgccatcagtgactgctgagcctctcggagggcatgggaacattggacttcttgtggaaatgaagggctattgactatctcaaaaggttggaattgtcttcaactgcttaagtttttaccctaatgacatgtcgtgaacatttcaatcaatgtgtccttaactggacccactagcaaattgatgaatttgctggaaggagtttgttaaaaataaataaaaagaataataagaaccaactacaaaacgtgaaagaatattacataaacaaaaaaattaaatgagccctcaaaagtgattaggatgggtcagtgcaccactaccaaaggtaaccttgatacggtgttttggaaaaaaattcacccctgccttctgcactgaaaagtaaatccagtactgaatcagaccccttgctccttttccaaagtgctagctaatatttttaccaccccttttcatcttaaattggtgttctgacagtttcctttatgtgttttgaagttgacacatatttgggaatgatgctttcttaccagctcctaacatatcctttacaagtttaagggatgctgagcatcaccttacagaataacgctgaggtgctaaactttgcaagttgacagctgagggtcagggagactgcaactgaaatataccacccccttattttagtactaataaaaacatcaatggattttttcagaatattagtgagctttactccaatatctcatgtacccgtacgtgtgtccacagggctctcttggtctctgtatggggagatcacgtcaactgagagaatggttatttagcttatcaccattccccaggagaacacataagatcttggagagggcgtggactggtacaagtgctgattgtataatgctccatgcagccatagcacagtgtatrgagtaaggaaggtagggggagagcttgtggagctrtagaaatattgaataaatgaaaaygtggattctctctttgtgtgtagtatgaaatgcttcatgtcacacctccaatgagcccaccagatgtcctcaagaccagtcctgtggctgatgctgctggttgggtggatgtggataaagaaactctgcaacacaggaggtacccaaatgtgtttgggattggggactgcaccaaccttcctacgtcaaagaccgctgctgcagtaggtaagtcaaycagctccatttctccctttctcaaaaatatgtcacctcaaggcatgattgtaacaaaaacacaagcttggcatcggccagagacggtggttcctgcctgtaatcccagcactttgggagactcaggcaggcaggtcatttgaggccaggagtttgagaccagcctggccaacatggtgaaaccccgtctctactaaaaatacaaaaattagtcaggcgtgtggtgggcgcctgcaatcccagctactcaggaggctgaggcagaagaattgcttgaacacgggaggtggaggttgcagtgagccaagatcgcaccactcctttccagcctgggtgacagagcaaggcttcatctcaaaaaaaaaaaaaaaaggccttcctaagacagaagcaagttrtcaatgaacccagtgtcatatacagcaaaaaataccttttgagtgctttgccccagagtagcatgatcttatctaccttttctaggtcagaggggttgttgtcagaagagggggccttagagtgcatcrcttttctagctctcttgaattctgttacttctcatactgccatactggcatccctggtatctttgcctctgacaccaggcaggttggctatttttcttctgcctgaaacaccataaagctcgaggagcatttgttttcccagaaaacacatgsaagtcaatgaaagcttgcagaccagaaaattgtcctgttaagacaaatacagtggagcatgccctgagtggtacacgattaaggcctcagcctggaaaactaaattcttcacctcgatgttctgcaccagcagtgatggggagaattgccttttagattctgtcctctactgacaggaactgtcttctctggatgctataaaacacaagaccttcagtatggtcatgttttgtgtgaattagacacctgtggaacagattgtgttacttttgctgactatttcaacctcaaggtagaccatctaggaaactcactgagtgtctttttcattattaatattaatttccttccaactttttatttaaaaaaaaatctcaaacctatacaaatttgaaataaattataatactcatatacccttcaggtattaaccaattattaatattttgtgacatttgcttcatcgtatttatgtatatatgtatattatgtatgtatatattatgtgtgtgtgtgtgtgtgtacatatatatatatatatttttgtttgtttgtttgtttgtttgttttttggtggggggacagaatttcactcttgttgcctggactggagtgcagtggcgcactctcagctcactgcaacctctgtctcccaggttcaagcgattctccttcctcagcctcccaagtagctggtattacaggcacccaccaccacacctggctaattttttttatttttagtagagatggggtttcaccatgttggccaggctggtctcgaactcctggctgcaggtgatctgcccaccttggcctcccaaagtgctaggattacaggcgtgagccaccacgcccagcctgtatttatgtatattttcctaaaaatgtccttttttgtcccagcccctccttaaatccaccagccagtcaaggatcacacactgcattgggcgtcatgcctctttggttccctttaatatagagcaggccttctgacatttttttctttactttcatgacattgacatttttgaagattccaggccagttaccttgtagaataccccaaaatttagaattgtctagttgctttcttacggttagattcaggttatatgttttggcaaaaatctccatacctgagkctgtgtacctccctctgtggcacctcaggagcctgtcatgttagtttgtcttgtctttagtgaagctagacttcctcactgggttaaggggtgttctctctctctctctctctttttttttcattgtaaaagtactctctctctctttgtaatttgtaggtagtctgtggggtgatactttgaaatgacactcatttaatgtaagcctgcagcatttatgtggtgaaactacctgtgatgtgaggcccagattacccagcttttagccttcttcaaacaaatatttaattcgatgttccagatagataagactgaatatgactgaacaaaaatattctaagtggaaagtcttgttcccagtcctgcagtgcatctgcgtggctttcacagtcccccaaccatggagggagcatccccattgtttttacatttgtgtcttacaatctgcaacctattctatggttgctctagagcttatttaaagagtccactcttaattatatctgggttgtttccaaccatttttattcaaacagtaccataatgagtgctctttacctgctatttaggttggtgcaaaagtaattgcggtttttgccattaagagtaatgtctctaaatttttgccattaagaggagtggcaaaaaccgcagttacttgyaccaagctaatatttcacctgtgtgaaagtctatttactcttctcttcaatgtccaaattacaatagtactagctgttcccaagcagatcttcatttcttcttagattcccttccccaaatcctctgagtatcccaaggcaatgctacactttttccacaaatctgtccttgggtttacttgccaccaatcctctgttcagacccttatgcgattgtgagcgagacccatcttgccatgttgagtctggctttccggagctcatgtccccttctctgcttctctctgccccaggatgctcctttaattactcccagcacagctaagatcaggatgtggcatttaacaaaagttaactgaaggcatgggcatgatagaaggggattgtaatacagggcaaaaacccaagtcccgcacgcctgcacccatgcacactttaagcctggacgttgagtgactgcttcctggctccacaggcctcacctctctgtggtggcacccactggatgtctccactccttttccattggccttgatgtcctgctgctgtggcctcctcaagtgttctcagtccagattccaaactctttatggccctcaaaaaggaacacagttttccaaaagggaaatatgatctttagagatgttgctttgcccacagtgaatatagccatttaatttttttttgttttttagagacaaggtctcgctctgtcgcccagggtggagtgtagtagagtgatcacggctcgctgcagacttgacctcttgggctcaagtgatccttccacttcaacccccacccccccacccaagtagctggaactgtaggcatgtgtcaccatacccagctaatttttaagttatctgtagagatagggtctccctatgttgcccaagtctcaaactcctgggctcaagcgatcctcctgctttggcctcccaaaatgttgggattataggcattagccactgtgcttggcctcatttaawatatatatatatatttagatggagtcttgctctgttgccyrggctggagtgcagtggcacgatcttggctcactgcaacctctgcctcctgggttcaagcaattctcttgtcttagcctcctgagtagctaggattataggcacctgccaccacgcctggctaattttyctatttttagtagagacggggttttaccatgttggccaggctgttcttgaactcctgaactcaagtgatccacccacctcagcctcccaaagtgctgggattacaggcgtgagccaccgcgcccrgcctcatttaatatttttaagtagagttgtttactcttcatttttgtgaccctcacccattctagaaaaaaaatcattgcttctttgatttggacatcagcaaactatagcttatggggcaatgcagtccactgcctgtttttgtatggtggaaattttgttttttctcattatataatatctttgatttgccgtgggcccacaaggcctgcaatttttcttacagaaaaagtttgctaacccctgatttgggagattgcaaaataaccactttaataagcattttataatacaaaggtaacccatctttcctcaaacgtgaatcccatgttctacctctagagacacaaactgctgtatcttcattttattttatttttgagacagagtctcattccgtcatgcaggctggagggcagtggtgcaatctcagctcattgcaacctctgcctccggattcaatctattcttgtgcctcagcctcctgagtagctggaattacaggagcgacaccacgcctggctaattttttgtatttttagtagagacaggtttcaccatgttggccaggctggtctcaaactcctgtgatctgctcaccttggtcccccaaagtgctgagattacaggcgtaagccaccatgctcggccacaaactgctgtctccttaaaagggtagtctttttttgtttttctgaggtggcgtctcactttatccccaagggtggagtgcagtggtgccatctcggcttgctgcaacctccgcgattctcctgcctcagcctcctgagtagctgggattacaggcgtgtaccatcatgcctgactaatttttgtatttttagtagagatggggtttcatcatattggccaggctggtcttgaactcctgacctcaaatgatccactttcctcggcctcccaaagtgttgggattacaggcatgagccaccatgcccatctgggcagtcttaattattcaacattgaacacaaactgggtttagattatatgaagaaactattactaatattttgggggtgcgaaaatactgcgggtttgtgttaagaaaattccccatcagagatacagacaggagatttatgagtgaactgatgtgatatctgctctaaaaatacagcgggaaaaaaatagcatgtgtgatgagatgcatgaaacaaaacgatggaatttgaacattttcctaataaaaaaggcagtctccccattcttgccaaagaaaaacagaaacaaatcccgatgtatgtatgtatctatctgtatctgtctgtcgttctgtctgtctgtctgtctatctaggaaagagacagagagatggaaatacaggtagatctatatatctgtatctctatatctatagatctatatctatatccacagatctatatctatatctgtatctatatccacctggtcctgcctcagccaggacagtccggtagagaggaaggcctgctttgtcttattggaaatgcctggggctaccaatccagactgcctgtgaacagggacacagggataacccacatggtcaagaacactgactaagtggacacacagactaagttgacagcctcaaccccaagaggagaggcagtggatttggggtaggtccctccttacagccacactggagggagtcggctctttagtatcaaacccatggaaacacatgcgcaggccttccatgaattaaagaaccccctcyggtagtcagaatttcarttagtaagaaggtcatgttctagtcacagtcttgagggatgggaaatggaatcttcttgtttacattaaagttatttgcaaattagttttcatggaaaaccttgatgcttacatttttctgactttcccatttctcttatagctgcccagtcaggaatacttgataggacaatttctgtaattatgaagaatcaaacaccaacaaagaaggtttgtatgccttgtaagaatcactgtctcaatgatcatcttccattctgtgtaaaagtagtgttttcccacaattttgcactttctgtcttttctttttttctgtttttcttttttttttttttgagatgcagtttgctcttgttgcccaggctggagtgcaatggcacgatctcagctcaccgcaacctccacctcctgggttcaagcgattctcctgcctcagcctcccgaatagatggaattacaggcatgtgccaccacacctggctaattttttgtatttttagtagagacagggtttctccatgttggtcaggctgatctcaaactcctgacctcagrtgatccacccgccttggcctcccaaactgctgggattacaggtgtgagccaccgcgcctggcccagttttgcacttttttaattagtgtctccaatatgggcatttctgtttttgccattagtactattttttttgtaatataatttacatttttcacagtacaaaaagytagaatatacagaaaagaaaaaatatataagcactcacagcaaataataaattctatagtgttaatatagtaccatgaaaaaaatctactttccaactcagtctgatttacaattttagtatgatggctacacatcatgtccactggtgaccggctacaaccgtgtgattcttgctgartttgactacaaagcagagccrctagaaaccttcccctttgatcaaagcaaagagcgcctttccatgtatctcatgaaagctgacctgatgcctttcctgtattggaatatgatgctaaggtaagtgcactgcctggttcctggatgaggaaagggatttgtagcacatctccacccaaaggggatgcagcctcttttcttcattattagcagtgaccaagtgttctgtcttccatgctctaggccctcttttgctgctggataaataataatagtaaatcactttcacataccaagtactctatcatctgctaccttacttttttttttttttttttgagacagagtcttgctctgttgcccaggttggagtgcagtggcacaatcttggctcactgcaacctccacttcctgggttcatgcaattttcctgccccagcctcctgagtagctgggattacaggtgcctgccaccacgcctggctaatttttatatttttagtagagacgggtctctactaaatgttggccaggctggtctcaaactcccaacctcaagtgatccgcccgcctcggcctcccaatgtgttgggattacaggcatgagccaccgctcctggccccttacctttgtttttattgttatgggagaaaccaaacagtgagtaagagcacagactttggagtcagacctgcatttgagtcatacttctgctattagcatggcagaagtcattagcagtgtcattatggccattagcagtgtcatgctattagcatgacatacatagctgtgtgtcccagggaaagttctgtttaatttaattaaacactctttgtgtttaaatttctcatctgcaaaatgaaagtaacattgcctacctcacaagatggaggttaatgagataacacataaagaggcaggtacatagtagggattcaataagtaaatagagtaataaaaacgagtaattcctcttcctcctttttttttttttttttggaggcaaagtcttgccctgcccgtggtgtgatctcagctcgctgcaacctccacctcccgggttcaagcaattttcctgcctcagcctcccaagtagctgggattacaggaatgcaccaccatgcccagctaatttttgtatttttagtagagacagggttttgccatgttggccaggctggtctcaaactcctggcctcaaatgatccacctgcctcagcctcccaaagtgctgggattaccggtgtgagccactgcacccagccactcttctgcattctaaaagctgatgacctcctttgacttttctaaacccatatgagagagaaatctgggtgtctacatcagtggtcctgaaccaagagtgatcttcctaccccttgctgccccagggacatttgataatttctggagacactttttggttgttacaactggaggggtgctacttgcatttagtgagcagaggccagggatactgctaaacgtcctataatgccaggtcagcccccaacagcaaagaattatctggtccaacatatcaatagggccaagattgcaaaatcctacagttaattatgaggtaatgaaagcagaaagagtagcagtttgcatgtagtagaggctttagacacatttgccaaattgagttagcacatccaggctcacacagcaagtctttgtcaaagcttaggaatggaagtaggttgtcccctcctagtcatgggatctctccaactcactagacaatcttgctttacgtgctgatgaacatgctctgtgagcagcctggcttccctttcagcatcstcctgactgaagtcgccccatctctcttgctgcaggtacatttttttgtgttatttcttacaggggttactggggaggaccagcgtttctgcgcaagttgtttcatctaggtatgagttaaggatggctcagcacttgctcatcttggatggcttytgggccaaaactkcagtcactgaatgaccaagagcagcacgaaggacttggaacctatccttgtaaagagttccttgatgggtaatggtgaccaaatgcctcccttttcagtacctttgaacagcaaccatgtgggctactcatgatgggcttgattctttgggaataataaaatgaaataatacttttaytttctgaataaaagtttgtcactgattgtgttctatgagaaaattttatcttggctgatagggatgaaaagttccagcacttgggagaaaaatatggtggtggtgggctagcttatatgttatctactgtgagtattcagctgacagctggcataatttcacagagcctatttggattcactgaaaagggtcattccagggacaatattgtttcaaacatagtgggcagtagccctgaacatgtgctgcttagaactcctgccgcgggagcactgtggagtaagagcccagctgccacccctcttgttccaccaccctgtttatgctaaggccatactttcttccagccagagactgaacatggtggggcgccagtgctggcccattccttggaatgtgggacttctctactggacaactttagctccaggaccccccatgaacctggctgaaacttccttagaactgtgctgcgtctgaggttctatccagtcctccttccttccccctctgttttcatacgtgtccatctttcacggtggtgtgaaggcccgccttgccttctcctgttccgtctcctttatgcttcctagccatttcccccactaaatctcctgcaaacctagttctctccaggcacctgtttctcagggaacctacacacagtgagactggggttagaggaatcctgatgtgtataccaagcatttgctagattcagtcccaattttgctaacaaggttttgaatgagtttgtactagagatattgcaggaaatagttccagtttatttgaagttcagcagtggcttaaaaataatttgttttccattagtttattgtagaagttcacaggttcagttcaatctggcattttaaagctgtgaacatttcatatttataaactcccccaaagggaaaggcatagcagtttatacaatgccttagattttttttttttttttagacggagtctcgctctgtcgcccaggctggagtgcagtggcgcgatctcagctcactgcaagctccgcctcccgggttcacaccattctcctgcctcagcctcccgagtagctgggactacaggcgcccaccaccatacccagctaattttttgtatttttagtagagacagggtttcactgtgttagccaggatggtctcaatctcctgacctcatgatccacccacctcagcctcccaaagtgctgggattacaggcgtgagccaccatgccccaccacaatgccttagatttttataaggttagagttcaaacccttttatgtgttactagattgccaagtctgttttcctagcgttctctcgatgatgttagaaactttgggcgttcactcactcattcaacaaatatttattgagcatatactacctgctaagtactattcttggcccagggtatatactgtgttgaaccagacaaataagggccctgtccacatttttgtggtgcctgtgatagtttcctcttcttttcctgggatgccaagggagcttgttgagtgaggtcctggcttgattagagaagtagactgtcttcagtggcatacaatctgggggagggcagggcactaactgctctagccgcaggccgctaacctggcgacaggggtagaagatgttctctagggtgtccacacatcctggtttgcctgggatagtcctgtttaatacctattgtcctggcttaactaaatagtgtcccctttagctctccaagatgtcgcagtttagacaatagatttacaagcactctggggatcaccctccaccccccagtcccagaatgggagagtagtgctacgaatggtgctaatacaggacttgtcacctcattggcttttccatggtgctcatgagacaagcaggagtaggattagtctgccttgttctctgagtcctggcaaagaaactccatccctttatggagttcctgcccgagactgctgccgcctggctcctggtgggctgctcactctctcaggcatggaggtcagggagagccgggggctgttcacctctaatggttcttccctgcagggtctaggaaggcttggggataatccagttgggactctctccctggatgtagacaaaagtgctggcaaggtaagtttctgcattttcagagaatggggctgtgattcagagaatggctgaggctccaggtggagtaactttgaaatcccttgtggagttacctcgagcctcctgggtctgtttacgatgakgcattctgaasgaaaccttcaagcatcagggaattgattccaggttcacattatgctgggtaggttgtattgccaaagctggagacagcagtgaccatgactggacagttttctttcccctgagctgggaaagacaaaatgtgctgaattccagaaaagcttagcctttgaaaccttatccacaaatgtggggtgccaagggagagggcttcccttagcactgctgccataattaggagtgggcagtaggaagaggaggtaagaccagggtagggataaggatagtgatttttccaagggtgttaccttggggtggggaggatgttgtaggtcccatcctacagagggctccaaactcaggccttcagggtccataagtgacgtggtgctgagactgccgacttggggaatctctttaaaccctccaccccttttctccagagcttcttccttctcaattcctgctttggtgttagccctggatgagctgtgggtgtaataacagagctgaggttgtagtttaggggccactggggtacagggaagtaggctaggcttaagttgacttggggatcacagagtttgagatttaatatgattttttttgggtattaactttttttttttttttttgagagggaatcttgctctgtcacccaagctggagtgcagtggcccgatttcggctcactgcaacctctgcctcccaggttcaagtgattctactgcatcagcctcctaagtatctgagactacaggtgcatgccaccatactgggctaatttttgtatttgtggtaaagatggggtttctccatgttggtcaggctggtcttgaactcttgacctcaggtgattggcctgccttggcctcccaaagtgctgggactacaggcgtgagccaccgtgcctagctgatattaacattttaaatgctttttttccttgtctaaattttgtaaggaatttagagaacaggtgtaaacaagaggactaaaaatcacttccacatttgccacccagttataataactagtaacatgttgatgtctctcaattgacctaatatgattacatatcaagtttctgaaaactgaaacaggatgaccttgtaagtagtgttctgtggcctagcgtcttatgcttaatagatagacactgaagacccagtggttggttgtggagaggaggtaatcggggcaatctctcaaggagcacagggcgtttgtgcctgctgagaaaactgctcattaaccaattaatgtaacatatatatgtcatgtgctaagtaaggtattggtacataatcagcattaagtattttcctcatgcaactcttcttttttttgagacagtctcactctgttgcccagactggagtgcagtggcgtaatctctgctcactgcaacctccacctcccaggctcagcctcccgagtagctgggattacaggtctgtgctgccacacccaggtaatttttttttttttttttgtatttttagtacagagggagtttcaccatgctggcccaaatggtctcaaactcctgacctcaaatgatccaccctcctcggcctcccaaagtgctgggattacaggcgtgagctactgcgcctggtctttttctcatgtcattcttacaacaaccttgcaggagaaattatcaaagacacctttctcaaaagacatggaatattattccttttgagaaaggtggcttttgtaatgcaatgtataaaagtagctcctctggatgttttggttttaaatgcagtggttaactgttccgacattaaaacaaagttcccccttcacatcctaagaccacagagcttttgttcaggatgggacccctgtgatcatctcagggagggaagaaatgctttggataagatgaaggcttttgagtggattaaggaaaactatatttctccggttaggttaactgtcaagtagctaagaaaattgcatgtctatatgctggaagaagtcaaggttaacattcggcaataggtagaaaggtcacaagaagcaattgagaagaagacggatggtgaaataccaggcagttttctccctcaatatggattttttaaaagtaatttccctggagtatagcatgctataaacaatcctaaattaggtcataactttccatatttgcatgaagtaaaactcctgtgattgcatccctcaggtacaatttggggccactcccaggcctacagtagaatagaggctgcagaagggcaggtcctctggtgtatactaggtaccagctgtgtcgggttttcttgaagaccagccgatagaacagaggactaggagccccagacctggatttggatcctggctctcccaccgactactgcctgagagtgtccagctcaagcatattagtcagcatttcctcacctgtaggatgggtaataataccgtttccactgagttcatatgaggattaagtaaatcaagggaaagctctgagcagtttgacagctagacggtagctactgttgttaactctaggaatccaacaaagcattcacaaatataattccccctgaaactagaaatttctatcagtcctgcagaaatgggatcatgacaggggtttccagcatccttgcactagtcaaagggcatgcagattctgttacttgccacccttacatctctctgcctcatttcagactttcagcactgggaaattcccagtgttacagattcgccaatgtcgggtagtgggtaaaagtgcaggtgtggacccggcctctgggtttgaatcctagatctgcttctcattgagtgtatggtctaggggaagccatttcaactctctaggtcccagttttctttctttttttttttggaaatggggtctcactctgttgcccaggctggtgtgcaggggcrccatctcgggtcactgtaacctctgccctccaggttcaattgatcctcctgcctcagccttgccagtagcagggactacaggcacggaccactacacctggctaatttttttttcctgcctgccttcctgcctgccttcttgccttcctgcctgcctgcctgcctgcctgcctgcctgcctgcctgccttcttgcctgcctgccttccttccttctttccttttttttttttttgctctgtagcccaggttggagtgcaatggtgagacctcggctccctgcaacctctgcctctcagattcaagcgatccttctgcctcagcctctggagtagctgggactacaggcccccatagccatgcctggctaatnnnnnnnnnnnnnnnnnnnnnnnnnnnnnnnnnnnnnnnnnnnnnnnnnnnnnnnnnnnnnnnnnnnnnnnnnnnnnnnnnnnnnnnnnnnnnnnnnnnnnnnnnnnnnnnnnnnnnnnnnnnnnnnnnnnnnnnnnnnnnnnnnnnnnnnnnnnnnnnnnnnnnnnnnnnnnnnnnnnnnnnnnnnnnnnnnnnnnnnnnnnnnnnnnnnnnnnnnnnnnnnnnnnnnnnnnnnnnnnnnnnnnnnnnnnnnnnnnnnnnnnnnnnnnnnnnnnnnnnnnnnnnnnnnnnnnnnnnnnnnnnnnnnnnnnnnnnnnnnnnnnnnnnnnnnnnnnnnnnnnnnnnnnnnnnnnnnnnnnnnnnnnnnnnnnnnnnnnnnnnnnnnnnnnnnnnnnnnnnnnnnnnnnnnnnnnnnnnnnnnnnnnnnnnnnnnnnnnnnnnnnnnnnnnnnnnnnnnnnnnnnnnnnnnnnnnnnnnnnnnnnnnnnnnnnnnn

SEQ ID NO: 94495 - DNA, 17689 bp, Homo sapiens
tggtggctatgcagtcggggtgctcagctagtagcatagaaggctaaagccaaccccatctctgaataccccagtgggcccaaggataaaggagccttcctcaaaagcagttacaggccaagcatggtggctcacacctgtagtctcagcactttgggaggctgaggtgggagaatcacttgagcccaggggtttgagaccagcctgggtgacacagtaagaccctgtctcttaaaaaaaaaaaattagctgggtgctgtggcatgtgcttgtggtcccagctatgtgggaggctgaggtgggaggattccttgagcctgggactttgaggttgcagtgagctatgactgtgacatagcgagaccctgtctcaaaagaaaacagttcttaacaagcccacacttggagcagctactcttgtacctgaccccaaaagtcgtgtgcctgatcctgagagcagactgcacatatctgtgggcagtcggcctgagacagccaccactgagtgcctacagcactgcccatttggccaagaccagcaacttccctgacctttttggatctcctaggtcccagttcagggccctgaatacccacaaccactgactgacagccctaccacctgctgtctctcctggcggccacagcagcagcagcagcagtaggaccatctctggtatcacatgaggtagggatcagatggctctgagaacaggccaggactgagtatggggtgggggtgggcaggaactctctgcaagcaggcactttctgaccaccacagttgcttaaatagaacaggtaacgttgctgccttttggacctgcctaaagggcagaagtcgtaaaagacagaacagctaaggctgatgagggggtgagagacagggacaaccgtgcctcactgcagggagggagaacctacttgatcctttgaagaagtaatctggcaacagtcttaaaagtgactgcagttcaaacactctagccacacgactccagccctgggcatcctcacagcattgtttacaaaagcaaaagtccttccaaactagggcactggtatgggccacagcagaccccctggccctaaagatgctcagtaagataaattgataatggggaaaaatactcacgggataacatttgatgataaaaataggatgcaaacttctatagacttttggaagtgagggacatgtccattaccttgatggtagtgatggtttcacgggttttatatatatgttaacacttatcaaattgtacactttaagtatgtgtagtttattgtatattaatcatagctcaataaaaacgttttaagaaaagaactgaaggtgataaatttttttaaagttttctatacagcataatctgaactacatacattataagataaacagacatgaagttaaaaagcttctgcatagcaaagtaaacgatcaacaaagtgaagagacagcccacaaatgggagaaaatatttgtaaactacccatctgacaagggattaataaccagaatatacaaagaacgcaaacaactctataggaaaaaaactaataattccatcaaaagatgggcaaaagatacgaacagacatttctcaaaagaagacatacgaatggtaaacaggcatatggaaaggcattcaacgtcactggtcatcagagaaatgcaaatcaaaactacgagatatcatctcacaccagctaaaatggcttttatccaaaagacaggcaataacaaatgctggcgaggttgtggaacccctgtatgctgttagtgggaatgtaaattataatagtgcaatcactatcgagaacagtttggaggttcctcaaaaaactaaaaattggtcaggtgcggtggctcatgcctgtaatctcagcactttgggacgtcgaggtgggaggatcacctgaggctaggagttcgagaccagcctggccaacatggcgaaaccccatctctactaaaaataccaaaattaactgggtgtggtggtttgtgcctgtaatcccagctactcgggaggctgaggcaggagaattactagaacttgggaggcagaggttgcagtgagccaagatcatgccactgcactccaggctgggcaacaagagcaaaactccatctcaaaaaaaaaaaaaaaaaaaaaaaaaaggccaggcacactggctcacgcctgtaatcccagcactttgggaggccgaggtgggcggatcacgagctcaggagatcaagaccatcctggctaacacggtgaaaccccgtctctactaaaaatgcaaaaaattagctgggcatggtggcgggcacctgcagtcccagctacttgggaggctgaggcagaagaatggcatgaacctgggaggcggagcttgcagtgagctgagattgtgcccctgcactccagcctgggcaacagagcaagactccgtctcaaaaaaaaaaatttttcaaaaaaaaaaaaactaaactaaaaattgagctaccatatgatccagcaaccccactgctgggtatatacctgaaagaagggaaatcagtatatcaaagagatatctgcattcccatgtttgttgcagcactgttcacaatagccaagatttggaagcaatctaagtgtccatcaacagatgaataaataaagaaaacatggtacatatacacaacggagtactattcggccataaaaaagaatgagatcctgtaatatgcaacaacatggatggaactggaggtcattatgttaaatgaaataagccaggcagaaaaagacaaacattgcatgttatcacttatttgtgacagctaaaaattaaaacaattgaactcatagaggcaaagtactggatggttaccagaggcttggaagggtagtatagggcttgtggggagatggggatggctaatgcgtacaaaaaaattgaattaatgagacctatctggtagcagaacagagtgactatagtaaataataattgtacatttaaaaataactaaaagagtataactagattgtttataagacaaaagataaatgcttgaggggatggataccccatttaccatgatgtgattattacgcattgcatgcctgtatcaaagtatctcatgtaccctataaatatatatacctactacatacccacaaaaattaaaaattaaaaatgtaacacaaagaaagaaacagaaaagaatcacatttgaatagtcatgttaaaataacaagatagcaggtgcttttccttctttttttagagacagggtcttgctctgtcacccaggctacagtgcagtggcatgcagaggccaactcactgcagcctcaacctcctaggctcaagtgatcctcccacatcagcctccctaacagctgggactacaggtgcacaccaccatgcccaggtaatttctgtattttattgtagagatggggtcttgccatgttgctcaggctggtcttgaactcctggactcaagcaatctacccaccttggcctcccaaagtgctgggattacaggtgtgaaccactgtgcctggccctctaagtttctgctaaaatgtacttgtaacttttatactgactacacttaaaagtattaaacttgtaaagaaaaggccctggaggagtttgttctttacaaggtcagtcagaagctacaaggggccaggctggggccaaggtgagggcaggtacatgcaggggcagatgctgggtatggagtaggtgccaggtgctagctgggcatgaatgtgcacccgctccctgacctctgctccctgactctcagaaggaactagcactgcctggagacaggaagaagcagagtacggaaggcagactctctggccagagatctcgcagccaggagcacagtgagaacagagcctaagcctatctgtccagagcccaggctccctttccctacaactgcagcctccttattctggtctggcccagcagagtgaggaggggccacccacccagccatacctgctggtggctgctgggggtgcatgttcagaagaggaaaagatgcggttcaggtagtcattcagcagcttctcctgcacaatgcctgagccacaagtcagaagggagaaaagggccacatgatcagtgcagctcctggcccctgctggccccagagacttctggtcctaggccagccacaggtgcagcaaggcctgaggcctttgtcccttccttctcctcccaacaagaggagcctccttccttccctgccagctcttacctgtgaccctggatttctcagcatctgaggtcagcctatagctcttgcgggagaaagacatgccggcccccttggatgccatccttcatctctcatgggcagccagtggtcctgggggctgagccagacacagagcctgtctactcagggccagccaggggcccccacacctgacctcagtcctgccatggcaggaaggcttgggagcaggtgaggccaggggcatgcacactaacacatagggcaggggaatgcaggggctcccagcttcctacacagggagggtagccagggtctaggcccatgtaacagggaccacttcttgttctccagtgtccctgtgcccagcacagggctgggcagagagcaggtactagatatatttttgccgaaccataacaaaatgtctcagctctgtggaaatcagaccaaaatgtccaaagtgaggtgtcctaggggcagagcccctgtatccatctcagttgtaagccatactgagtccagctcacaaccagaagcgacaatcctacacattcccccaagtgcagaccaccactggtctggtcatctctagccataagtcccacttactccccacaaggctggagcctctttcctcagccctgggttcctcccttcttttatccatggtcctgatagtttcaccattcccactcacacatgtggcctcccacctcatccaagcaccacccttgcccagccctcatggcaaactccattggtcctcctagtgcatctatccctcacatcatgttgctgctgcagctgctccagaacctgcactgagtccctggtgctggcctcactgatgtgtagcggtgctgtccaacacagcagccgtcatccacatgaggttacttaaatttaaagttttaaaaattaacaattcgatttctcagttgccttagccacatttcaagagttcaatgaccacatgtggctaatggttactctgttggacagcacaaaggtagaacgttcccaccatcatataaagttctattagacagcgcaggtctagagtttcgctctgcagcactgccttagccagcactccctactctgcagttcagtctcttatctcaccccaaacagaccctctactcccgccacaaacccttgtgggtctgcaccacgcctgctcctcgggaaggtgattttcccgacctcgggccctcggtgggcgtccatgatcggtgccccttcactaccagagtagttgaagatctgattaaactcagtcattcatttgatgagcagaccttccagacacccggagtgggctccgggagtcagttgctgaggacccaggtgagaggcggaccttgtccccgcccggggactccctgtcacggctatcccgtccaaccccgccggggtatccggactcagaactgaacctactccgtctgggagcccaaggacggcgagggcggcgcatggctcccccaagtcgcccccgcctggccccaagctccacaggacctgccagaccagcttccgctcggagtttcgcacccagatccctgcgctgcaggtgccctcgcactggactagcccggaccgcgaagggaatagccggaacccgccaggctcagagccctgccgcccctcactcacccggagcctcggccgcagcgacccggctcacaacatccgcccaacctcttggctacggcgtccgttcagggccaaatcacgcgcacgcttgcgcgctgagcctccagccgcgcacgcgcacyggcccgcgcccagcctccgckaggggaccccctccrtggcttcccaccrggttgttccaggcctcagcttcgccgaaaggcctcaccacctccgacctccgcctgcycyggggatgctcccagccctgctgcggcagaacgcgacrtgctaaccggaatccctaggccgcctgtctcctacccatacttagaggccccgctcagacggtcctkaaaacgtctgaaaggcsgttcctgccagagtccctgctacctgttacctccacccctatttagtcctagtggacagcytcgctcaccttccctgggatgacacttctggcggctgagatgagcgagcctctctgggctctgccgccgggtgtgggctgacctgcctacagctggggcctgataaggcagcagcaaaagggtggaggggaggcagtgttgaagctggggcaagtaattttccccaatttacagggaaaaaccgaaattcagaaaagtttaatgtcacccaggggctggagcccagacctctggcagctctcactttcacaatgcccttgggctgactaggctgcagaggggtttcaccccaaccccagggcacctcaagtgtccccaccaaaccttcctaacacctgtccactaagctgtactaggcccttgcaactgacctatgggacctgaggcctggcccctcatggctcctgtcaccaggtctcaggtcagggtccagcaggccctgagctgacgtgtggagccagagccacccaatcccgtagggacaggtttyrcaacttcccggatggggctgtggtgggtcacagtgcagcctccagccagaaggatggggtggctcycactcctgctgcttctgactcaatgcttaggggtccctggtaagtgcccccaaccytgatccccatctgccttcaggaggggsttggccccattctcctattctaggatgagaaaaaagtcggggagccagaggctcagtgggcatggggcagtgaccttgccctcttgagcacagctgggaagccctaggaacacatagacattgcccacttaggcctctattagcacgtctgctctagcactgaagcagtgtcaggaccacacagatgcacgcacacagcaggmartgacccctcctgagcctgatctacccctctaacctagcatatgcyttygtgcaggtgagagcccagmtttggagtctgaatgcctagccagggcccytggctgggtaatgtgatggctctgagccttagcattctcatttgagagatgaggtggggcaagcttcatcacccactgctctcacagagcgtrtgtgttagatctgagcccrgtgcctgggccactaaacagaggcaccggtgataactaccaagtctgggcctgcttcccaggggaaatttttttcacaagtatctgtgcagggggctagactggcccttgaaagtgcatacagggtccatcccagaagcttgtagctttgatcccctgaatgaacaaastgtggacatgccaatacacattactgacatgtatgcccacctgacctgcacccactcatgcctactctgcagggcagcgctcgccattgaatgacttccaagtgctccggggcacagagctacagcacctgctacatgcggtggtgcccrggccttggcaggaggatgtggcagatgctgaagagtgtgctggtcgctgtgggcccttaatggactgcyggtgagtggccactgggcmtagataagactgggggcagggaagcctgggctgtggcgttaccytgtgccttcttctctccagggcsttccactacaacgtgagcagccatggttgccaactgctgccatggactcaacactcrccccacacraggctgyggcgttctgggcgctrtgacctcttccagragaaaggcaagtgggggtggagaggggcagggtgggagacaggggacctcagcccaagttgatcttctgtctcttgctcccagactacrtacggacctgcatcatgaacaatggggttgggtaccggggcaccatggccacgaccgtgggtggcctgccctgccaggcttggagccacaagttcccraaygatcacmagtgrgacaaacaccttccctccrtcccggcctggggccttcccccagcacacactatagtgatgctctgggccctcaggtacacgcccactctccggaatggcctggaagagaacttctgccrtaaccctgatggcgaccccggaggtccttggtgctacacaacagaccctgctgtgcgcttccagagctgcrgcatcaaatcctgccgggagggtaagcggcgccgggtcaagctgggagagtggagggrcaagcccacgtccatccacgaacccactggctctttgtctccagccgcgtgtgtctggtgcaatggcgaggaataccgcggcgcggtagaccgcacggagtcagggcgcgagtgccagcgctgggatcttcagcacccgcaccagcaccccttcgagccgggcaagtacgcgtaggcggtatcggcgtcctgggggccgggctagggaaggtccaggactccaggggcagggctccgtgtagggcaattgggcggggccagataagccagagtmccagggtcttgttcacgccccattaccgcccccaggttcctcgaccaaggtctggacgacaactattgccggartcctgacggctccsagcggccatgrtgctacactacggatccgcagatcgagcgagarttctgtgacctcccccgctgcggtaggcggcggggaccaggcctgggagggtacctgggaaccttggggaggggcgtggcttggccggggaggtaagaggggctgggcgtgacctgagagcataccccgtggagtaccgtacacctgggaaaggcgggtttggtcccagccccagagggatctcagctctcgctcggggccsgacctatctcggtccatctaagggtccgaggcacagccccgccaagaggccacaactgtcagctgcttccgcgggaagggtgagggctaccggggcacagccaataccaccactgcgggcgtaccttgccagcgttgggacgcgcaaatcccdcatcagcaccgatttacgccagaaaaatacgcgtgcaagtgaggtggggggggggggcgggcgttgggacgtgctgctgcgggtgagacgggaggarggtagtcacrggctyarggctggaggctggcgggctagggctgagtgsagcgcctgyttagagaccttcgggagaacttytgcyggaaccycgacggctcagaggcgccctggtgcttcacmctgcggcccggcaygcgcgcggscttttgctaccagatmcggygttgtacagacgacgtgcggccccagggtgaggcccaagcttgggggctacagagccgggctggaagcctggaaccggagggccggggcgrggtctcggcctgatggctgcccgcacccgccacagactgctaccacggcgcaggggagcagtaccgcggcacggtcagcaagacccgcaagggtgtccagtgccagcgcksgtccgctgagacgccgcacaagcygcagtgartccctggtgctccyggccccgccagggccctaaccctggggcggcatgctttgrtgtctgggaccagagcctggaaatggttgagactaccctgccacgaytttgctcccgctyccgcctmggttcacrtttacctccgaaccrcatgcacaactggaggagaacttctgccrgaacccagatrgggatagcyatgggccctggtgctacacgatggacccaaggaccccattckactactgtgccctgcgacgctgcggtgagcactagtgacgcttsccccatgaccytrcctcagcccycacccaaaggctggctcccttaaccscagtgaactttgtctttcagctgatgaccagccgccatcaatcctggaccccccaggttasgagttgggccagttatgggtcaggccctttagcccacgacatccacacagtctgggtttcatccagcccaccccatcctacagaccaggtgcagtttgagaagtgtggcaagagggtggatcggctggatcagcgkygttccaagctgcgcktggytgggggccatccgggcaactcaccctggacagtcagcttgsggaatyggtgaggcacaackgcctgtctcccacagagaggagctgaggttgtgtcctctgtggttatsccactgggggctgggaatctatccstgcccccagaggtcctagccagaagatggcaggtctagcatctgtcccaggagtctgttycctgtcctaattccccactcctctaggcagggccagcatttctgcgsggggtctctagtraaggagcagtggatactgactgcccggcagtgcttctcctcctggtgagcctcccttgtgtttggggacccagtctcatcccacyttcccccttccccaggcaagctaacaagtgagccttggggcaayggactgagagtcacaaatgacctagcagagcttctctcccagccatatgcctctcacgggctatgaggtatggttgggcaccctgttccagaacccacagcatggagagccaagcctacagcgggtcccagtagccaagatgstgtgtgggccctcaggctcycagcttgtcctgctcaagctggagaggtatgtggacamcctgggaggrtgtgaggtggggctgggccttgtggcctcagaccctgagtgcccccattcttgytaaagatctgtgaccctgaaccagcgtgtggccctgatctgcctgccccctgaatgrtatgtggtgcctccagggaccaagtgtgagattgcaggcyggggtgagaccaaaggtaagagcacagtgcacaggactgctggtggccaggaggcccagccctggatcttcctgcaggaccctctccctctccccattcccctcactgcaggtacgggtaatgacacagtcctaaatgtggccttgctgaaygtcatctccaaccaggagtgtaacatcaagcaccgaggacgtgtgcgkgagagtgagatgtgcactgagggactgttggcccctgtggggscctgtgaggttggtrgcagggccctgggccagccctggaagggtatggggggctagaaatgaactattttatcatgaagcaggctagtcatkgctgtggccyrgggccctcatcagttctcctacctgccagrgtgactacgggggccyacttgcctgctttacccacaactgctgggtcctgraaggaattakaatccccaacygagtatgyrcaaggtccygctggccagctgtcttcacrcktgtctctgtgtttgtggactggattcacaaggtcatgagactgggttaggcccagccttgaygccatatgccttggggaggacaaaacttcttgtcagacataaagccatgtttcctctttatgcctgtacagatgcttcttagcctttgcttccaggaaatgtgtcagtgactccttgctagggctcgggtggcttgagcccagcacaccctgggctaggtgatctgtccagcctaggggcttccccaaccaaggcaatgtccctgggactacttttgcccatgggtgccgtggaaagacagggcctcacactagtcctccagacatactcttgggaagggtggtacagagtagttgctaatggaaggggctgcagcagggaagctaggctggtacagagtcctggttgccaggacaggcagaggctaagcctctcactgttccctcccttctcacactggaggcagatgaagcccttgtggctgccacacccagaacctagggtctctgcaccccagagtgggaggtggggttggggatggtttggtacaaagtaccagcaggaaccaggctctgtgtcctaatttattatgactacatagcccacattcctctgcccacgcatccgtggagtccagagcccagaaagcctcctgctgccctgccagaccgttgagctcctcaagagcgaagtgtggcacaggctgatcagctcatgcagaatggcagggcttcagctgcccaagtgtgtgcgtagccagagcacagcattcatgaagctgtctgactccacctccacctctgataatgcgtgggtgcttttgggatagagcaggagcctgtagggattagtcagcaacatttaaggttggagggtcctcctgtgctcacctgcccaccagctgccagggccttcatgctgcactcaccgaacaggcacattccgggtcttgagggcacggtaatactccatgccctgcttgaagggcacacgccggtcctcctggcccaacatcagtaacagtggtgtcttcacctgggtgtttggggaagagtggggagctgtgttgagctgggccctggattctggatggatgggcagcacacagggcaaggagggggctgcatacctgagggatgtatctgatgggcgatttgtccagcatctcagcccacacgctgaggtctggcaggcagtcactgctgaaaggaaagccagcctccaccacgcacctgcaagacaccgagctgttgcagccccaggaattctggggctacggggctccatgagaatttgaggtagaggagggaagggcagggacctgtggtgtatgcctaccagtcagggatgtcagtggagcccaacatggaggcgatgttgatcacggggttccgggccacgcaggccctgtaggtctctgggtactgaccaatcaagtggcaggaaatgaagccaccatgggaaccacccataagggccacatggcttgcatcaaagtgttcctcctggagcacctgttccactgcaaactgcagggtgggacaaagcatgctgcagccagctgcccgctcagctgaatggaggcatccccctggcagcccatgtttcagcctgtccagaagccccagcccctgctacctggacatccttcacatcctggtggcccacattgcctgggagggagaggatgctgtcctggccaaagcccgtggagccacgatagttcactgagggcagggagggaccagacagtgtagtcaggcaacattcccagccccctcgacgctcttttcacacatctgtgaagtaggccctggggccagctataccacagactgtcaaggggtcaaggggaagggactcagagatttgaggctgccacccagtgaccacagcgccctttccttggaagtcccgagttagtccttgttatcactatgccacagaaccagaggctgggccccagcagttcctggtagtggttactaggtctaggctagagaaagtcctggagactagagtggcacccatggtacttatacaaaccaggtccacccccgtcactccactgtagtcctaacagaactgtgggtccctgctcactcacctagtagtaccgcaaagcccatcttgcaaagcatggctgggaacagcatccaggcagtgacaaaggatgaatggggcccccctgcagacagggagcggagggtgaaagggccagctaggaagagggctgggagggcaagggctcttaacgccagatgcctaccgtggggcatgaccaccatgggcacttgggtcttatctggagggctgccaggctgcagcaggattgcttcaaagtcaaggccagctgcagggagagggcagcagtcagcagggtgagcctaggggcttccccaactaaggccccatctctagctgcaggtgtggggctgacctctgggtcagagacctggccaaggtagtccacaccatgacacatggaccccagaaggctcatacttcttctgccctcgtcagggaaccccatcctgcagcaacagcattcgggatgaggtgtggtcactgaggcttgtatgaggcctattttctttggacctgggtcttccaaccacagatgatttggcctggtgaagcccaggtgatatccagagcaggcgctcagatgtctagatgctacttcccatgcccatccacaagaggaacagaaaacctcttagaggtcatcaccagaaaccccacaatgtgagagaggaggtagcaaaggtcaccgcagaggctttgtgctggggaacctggagaaggcatccctctgcccctggcccagctcaccatactgcacattctcttgctctgggggtggctgtagcacccggatgccccagtggatgtcgggaatgggctcggcctcctccagggacacccacaacactgactgctccttccctgcagaaggcaggaacccaactttctgccaaggggaaagaatgtgtcataggtggcctggctgcctccctgcccttcccttctgcccacagtgggaaataggcagctctcactatgctgggccctctacccacctccagaaggtacagcatggcttcctgttgtgggatggtatataccaaggtattcatactcatacaatcacacacaggcacacccctccctcctcagcttctaggctctgctgtctcctttgctctgtaataccaagacagagcacttccccaggcaccttgttttgtacggagcagattctagcctagtagttcgtccctgtgagtgccaaaccctcatggaccatgccaagctgggcctgtgtcttggcccgtctgtatgctgaccagccaggtcagactctggggccaattccctgacctggtgagctctgcctgcccagaacccctgcctccacagcctgggacccaccgacactcaccagggttggaggtaggctgggtgtggaaaactgtgccaccatgaggtcctggtcaattgtgagcaacttccagctcccacctgaccctcctggaaaaggcagatgccattaagtgcttagcaggagccatcacctttcttacctgcttctctgtaacagagtcccaggctggagactctatggaaaggtgcccttttctccccgagaagtgcctttcacaaacacccaactgcacatggccccgggtgagcctcctgctctcagtctgttgttcatctgacagacactggctgggctgggaactgccaaaccttaagacacatcagaccatgcaggcacatctgcctgtccctcgatggctgctgtgtgcagggtggcagctgggaccgggaagttgggggtcggggagcgtgctgatttggggcagtggtgtccaagcagttgtacaatgagatgtagctttggaatgatactttggtagctttgtggaggagcggatacagtcaggtcaggtggaggactcaaaacacatttcaaaggcagaatcaccaggcctaagtatggggaagacgggggagtcaacactgggcttttcctgggccctcaggtggcagagctgcctctgcctgagacaggcacccaaggtttgcagagcgagaaggatgagtctggcagatcttgataagagagagttttgtgggttttaggagcagaggtgggggccgtgctgaggctgggccaggacacatggaacagagttgagtgctaaagggcagtagagcagggaagctagtctgttggttgggtaagggtctgcacagacaggggccttggggacctgttagtaaaggctgtggaacagtcagtggtgctgagtggctgagaatgccatcactgccccacatgttggagctccagtcccccgctgcctggttggcttgctcaccagccctgcccttacccccatccccaaagccttgctcaccagctgtgagggaggtcacagtgcccacttgggtgtccacagcaaacaggtcctgaagcagaggcaaggccacaggtgcgaccacatccaagagtactccctctacctatgggtccctcccctacctcctctctaccctcttggagagccctggccagaccaaggctgtggacagctatggtgatggttactcagtgcagtagggagtagtgtgagggcctgggttcaaatcccagcaccatcacaacttgctgggtgaccctgggcaaggtaaggaatggctttgagcccctttgagttggcacaaggaccaaatatcacacccaaaaggagcctggcacactgtgagtggctttactccatccctgggggaaggcctcagtcctgtccccatcagctgccattacagagtgttcagggacccacccgagtggcagtccccttgacccccagctagaaatgcctgggaggggttgcatctctgcctcagacgaaaaggcctgagttctgctgtggtgcaccagggcagccagtcccctccaggagaaatgagtccaggatgggcaggcagggttttaaggggctgatgagactttgtggctgggcattccacccaggggcatgcacatgcaacccccagggctcctgggggttgaccacaggggctgcccctcaacacaatcagcgtccctcacctgccggctgcgctgagccgagtcaaagaccactctctggctgtcagctgaccagcatcccaaaggcagaaggctgcagtagatcccagagaagttctctgtaaagataggagggctgaggctgcatccaggagtggaggtagggagggtagtctacaaggaaggctagggtactggggaattcacccagggccctactcaggcaccagtcaggcccctgcagcttgtagcacacatgggggcacgctacgcgatgaggagctgcctgagtaggtggctgaggggcagaggcctcttgggacccagagaggacccagagaggcagagctcaagagctccagagagaaaccatgggtgctcagaggaaaagcacttgctctcctgagtaattccagttgaacccaggtaggtaccaggtgctttaaccaagatatcatctgtccgtcttatctccactgtggtgcttagcacagcgcttggcacagggggctcagtaaatcctaccctttaatatcatcactcacttaacactcactatgatcctatgaggcaggcagacacaatcacccctccatgaagaaatgggagctcagggaggccaggaccctgtctgaggacacagctaatttagggcagagctgggattcatactaggttcccaccactgcatccctgcaacccaaagagaagacaaagaggctatcccttgtccactgaactcctggaactgaccgggtggcctgagaaaacaagagactcatccttgagatggtccaggaggatccaagcagagctatcaacactcgagacgggagcctctcagccaagagccaccctcctgaagacccagctgacttcagggcttagactggacaaaggttgctggggttaggatggtggatgggataatatcatgccctcgggtccagagcctctcgagtgtgacattccaacctagtgcacttcctgagacccacttgaaggagtcatggttttggtttgaaccagccattggaaaaataagaaaaatctaattatgacctgcagcacaggaaataatacatcatcaacttgggccactctgatctcagcttggtcctaccactccttgctattgaactgttc

SEQ ID NO: 94496 - DNA, 64082 bp, Homo sapiens
  misc_feature (1)...(64082): n = A,T,C or G
tccagtttttgcccattatgatattggctgtgggtttgtcataactagctcttattattttgagatacgttccatcaatacttagtttattagagtttttagcatgaagggctgttgaattttgttgaaggccttttctgcatctattgagataatcatgtggtttttgtcattggttctgtttatgtgatggattacgtttattgatttgcatatgttgaaccagccttgcatcccagggatgaagcccacttgatcatggtggataagctttttgatgtgctgctggattcagtttgccagtattttattgaggatttttgcatcgatgttcatcagggatattggtctaacattctcttttttagttgtgtctctgccaggctttggtatcaggatgatgctgacctcataaaatcatttagggaggagtccctctttttctattgtttggaatagtttcagaaggaatagtaccagttcctctttctacctctggtagaattcggctgtgaatccgtcttgccctggactttttttggttgatagtctattaattattgactcaatttcagaacctgttattggtttattcagagattcaacttcttcctgctttagtcctgggagggtgtatgtgtcgaggaatttatccatttcttctagattttctagtttatttccatagaggtggttatagtattctctgatggtagtttgtatttctgtgggatcggtggtgatatcccctttatcattttttattgtgtctatttgattcttctctcatttcttctttattagtcttgctagcagtctgtcgattttgttgatcttttcaaaaaaccagctcctgaattcactgattattttgaagggttttttgtgtctctatctccttcagttctgctctgatcttagttatttcttgccttctgttagcttttgaatttgtttgctcttgcttctctagttcttttaattgtgatgttagggtgttgattttagatctttcctactttgtcttctgggcatttagtgctataaatttccctctacacactgctttaaatgtgtcccagagattctggtactttgtgtctttgttctcattggtttcaaggaacatctttatttctgccttcatttcattatttacccagtagtcattcaggaacagtacagttttcatgtagttttgtggttttgagtgagtttcttaatcctgagttctaatttgattgcgctgtggtctcagaggcagtgtgttgtgatttctgttcttttacatttgctgagaagtgctttacttccaactatgtggtcaattttggaataagtgctatgtggtgcttagaagaatgtatattctgttgatttggggtggagagttctgtagatgtctactaggtctgcctggtgcagagctgagttcaagtcctggatatccttgttaacattctgtcttgttgatctgtctaatattgacagttggatgttaaagtctcccattatcatggtgtgggagtctaagtctctttgtaagtctctaaggacttgttttatgaatctgggtgctcctgtattgggtgcataaatatttaggatagttagctcttctttttgaattgatccctttaccactatgtaatggccttctctgtctcttgatctttgttggttcaaagtctgttttatcagagactaggattgaaacccctgcttttttttttttttttttggctttccatttgcttgttagatcttcttccatccctttattttgagccgatgtgagtctctgcaggtgagatgggtctcctgaatacagcacactgatgggtcttgaatctttacctaatttgccagtccatgtcttttaactggggcatttagcccgtttatatttaaggttaatatagtaggcttcagaaggttggtaataacatacttctcccagctaaagaaggatgtttgaacccatcatgcattgttatgtgtgaatttgatcctgtcattttgatgttagctggttattttgcccattatttaatgcattttcttcctagcattgatggtctttaaaatttggcatgtttttgcagtggctggtactggttgttgctttccatgtttagtgtttccttcaggagctcttgtaagggaggcctggtggtgacaaaacctctcagcatttgcttgtctgtaaagtattttatttctccttcacttatgatgcttagtttggctgaatatgaaattctgggttgaaaattcttttcttgaagaatgttgaatattggcccccactctcttctggcttgtagagtttctgctgagagatccagtgctagtctgaggggcttccctttgtgggtaatccgacctttctctctggctgcgcttaacattttttccttcatttcaaccttggtgaatctggcaattgtgtgtctcggggttgctcttcttgaggagtatctttgtggtgttctctgtatttccttaatttgaatgttggcctgtcttgctaggttgtggaagttctcctggataatatcctgaagagtgttttccaacttgtttccattctccctgtcactttcaggtacaccaatcaaatgtagatttggtcttttcacatagtcccatatttctcggaggctttgttcatttctttttactcttttttctctaaacttctcctctcactttatttcattaatttgatcttcaatcactgatatcctttcttccatttgaatgaattggctgttgaagcttgtgcatgcatcacatagttcttgtgccatggttttcagctccatcaggtcatttaaggtcttctctacactatttattccagttagccattcgtctaatcttttttcaaggtttttagcttctttgcgatgggtttgaacatcctcctttagctgggagaagtatgttattaccaaccttctgaagcctacttctctcagctcatcaaagtcattctccgtccacctttggtccgttgctgatgaggagctgtgatcttttggaggagaagaggcactctggattttagaattttccgtttttctgctctggtttctccccatcttcgtggttttatctacctttgatgctggtgacctacagatggggttttggtgtggatgtcctttttgttgatgttgatgctattcctatttgctagttttccttctaagagtcaggtccctcagctgcagatctgttggagtttgcgggaggtcaactccaaaccctgtttacctgagtattaccagtggaggctgcagaacagcaaatattgcagaagagcaaatgttgctgcctgatccttcctctggaagcttcgtcccacaggggcacccgcctgtatgaggtgtcagttggcccctactgggaagtgtctcccagttaggctacatgggggccagggacccacttgaggaggcagtctgtccattctcagagctcaaacactgtactgggagagccactgctctcttcagagctgtcagacagggacgtttaagtctgcagaagtttctgctgtcttttgttcacctatgccctgcccccagaggtgaggtctacagaggcagcagaccttgcagagctgcggtgggctctgcccagttcaaccttcccggctgctttgtttacctactcaagcctcagcaatggcggacgcccctcccctgccaggctgctgcctcagactgctgtgctagtagtgagcaaggctctgtgggcgtgggacccactgagccaggcacaggatttaatctcctggtgtgccatttgctaagaccgttggaaaagtgcagtatttgggtgagagtgtcctgattttccaggtacagtctgtcacagctttccttggctaggaaagggaaatcccccaaccgcttgcgcttcccgggtgaggcaatgcccctccctgcttcggctcaccctccatgggctgcagccactgtccaaccagtcccaatgagatgaaccaggtacctcagttggaaatgcagaaatcaccgtcttctgcatcgatcacactgggagctgcagaccggagctgttcctatttggccatcttggaacggaatctggatgatttacttttggctaccaatttggaagcctcatgccagcaggctactctagatctcttgaactttctaggtaatcaagcgggcaaggtgtctaaactgaaagcccagctctgcctacaacaagtcaaatatctaggcctaatcttagccagaggaaccagggccctcagcaaggaacaaatacagcctatactggcaccggtccctcaaggcgtagcaccaaccagattgataaactcacttatctgaccttgtggccctcgcccagaaactgactcagtccaagaagacagcttagatcccctatgatttcatctctgacccaaacaatcagcactcctgactcactggcctttccccacccatcaaactatccttaaaaactctgagtccccgtatgctcgaatgcttggggagccggatttgagcaataatgaaattccagtctcctgcatagctggttctgcatgaactctttccctattgcagttcccctgtcttgataaattagttttgtctaggcagcaggcaaggtgaatccattgggcggttacatattggggaggggggactgtaagggaatgaaatcctgagcattatcctcaaaggagggaggggccttatagacttaggcctatctagaagcgcctctctcctcagagagtaaaacctcactgtttctcagagggctgagaggcttgaaggaagagtttgggcagaaactctgctttgaatagaagcagcagatccagttgagagaaagaggttcacaaattccatttcatggcttttttttttttaaagacagattttcactcttgttgcccaggctggtgttgaatggcatgatctcagctcactgcaacctctgcttcccaggttcaagctattctcctgtctcagcctcccgagtagctgagattaaggcgcatgccaccatgcccggctaatttttgtatttttagtagagacggggttttcaccatattggtcaggctggtctcgaactcctgacctcaggtgatccacctgcctcggcttcccaaagtgctgggattacaggcaagagccactgcgcccggcctcatgtcttttttatacttaagcaccaggcccatgtaatgatgcacgaattcatttactcctactcgtgccaggccctttcctgggggctggagacaaagggccgacgtggacgctgcgtcatggtagcacctgtctcgcaaagtgcacaccgtgctccacccacagcctcagcattctcgttgctaggaatatggaccctcaggcagcacctcagacctagacctactgtatcagaatctctgtgctggtcctgagaatgtgcattctcaacagcgcctcacattccccaccccaattcttctgcagctaacgtttgagagcgctggtctggtgcctactgcctctgcaggcggttttcaaggcagccgtgtgtgcttgcatgtgaggcggcaaaaacagcgcgctgcagggccggcgcggtggctcacgcctgtaatcccagcactttgggaggcggaggcgggtggatcacgaggtcaggatatcgagaccatcctggctaacacggtgaaaccccgtctctactaaacaaaaatacgtggtggtgggcgcctgtagtcccagctattcgggaggctgaggcaggagaatggcttgaacccgggaggcagagcttgcagtgagccgggatcgcaccactgtactccagcctcggcgacaaacaaacaaacaaacaaaaaaaacagcgcgctgcagatggagccagcacccgggcttctcgctcccagccccctcccgaagccccgccccgcctccgggtctggaggaggctgggaagccccgcccctccrcgctagcrccgcccaggctggcacaaaggaggaagcctagtcccgcccctgcgtgcggcgcttctcccaggccccamcttccatccagtgccctggaccctcggctgggtagcgccaccagagcgaccaaacgtcccgcgccttccaggccgcactccagagccaaaagagctccatggcggcggcggccaagcccaacaacctttccctggtggtgcacggaccgggggacttgcgcctggtaagctgggaaggagggtgggaagcataccgatcctgcctcactctcctctgagcccagccatagtcctggcttcccacttccagcctggcgccggccccgcaccttaagcgccctggctgcccagatcccagctggttcccctcggggtgtgggggcagcaggtagtggctgttgcgaagggcagggatctagtcgtgtgcctcccggaacctagccccgtggctggcacgtggccggtgcccaggacggttgcaaactgtttgaatgaagctttctctctcctttgcyagctgcagattcatagtccagcctcttgtcattgacctttccaaaggaaatgctaaggctgtctgaattatcggggcagaccgtgcagagcagagaaaggggggccagaggacacttagaaacagcagaacttgtatttaactcccttgcttgggactgataaacctcccttgcaggattatgatgatcacaagagtactcagcacttagtacgtgctcaggaagtgccagctccttctcctttccttccagtctaggcctccatctccagaacccctgctgttccccttgcctgtgccagacttgtggatcttgatagctcccttgtctgtaaggatccttctctccmtaagaccctgtctggttcactttccagcagtttttctttccaatcccgtgcctctgtccctttaggagcattctgtatgtgtgtcctctgccttagaccctgccttttgctccctggcttgtggcaccaaagtttaggaagtggctgagtcagcmgcctagtcatgccaagcctcccttgacaaagtccctctcagatgggcctgggatggcagtgggtatgtgggatgagtgccagccatctctgctgctcccctgtacctcttttccctcaaagtacatgcgtcagtatgtaaactgcagtaattcagaagcttatccaggttagcagttcttgactatttaagaatctgtggtgtcccctccacagaatgcaaatagactgagtttggcaacaatttcagactgctcaaggactccctttaagccgctctaagcccctctatagaacccttgtcccagctgactctccatctcctcagttgaagaaagtrccatacccaaggtgataggttttgttagttaacagagccacgacaaggactcagatgttcagactccccattctagtgctcattccactctttggagcctccacccaaggtcctgaattaaagtgaggctgttagtgtttactgttgcaaatgccagatggtaytatgagtaagggaaagtggtccagctctacccagcttgcagagtgatttccaactcagtacttcattccacaaacattcactcatgaaagggtgcctgccatgtgccaggcactgggctgagggcccagaraggaggacacagcccctgctcccaagtttactgagggaggcagacagataaagtcaacaattatgacagagcccgagggctttgatggaggcctcagagagaaaagacgccacagggaggggcccttggccctctatctgctcagagcctgcttaaaagtcatgcrcctaagrtgcagaaacacagttamgttctccttcatcttacctcaaactcatggtcttccactgctcaggcagactacctctactatggttcygtagacaaagctttgaagattagagcagcagcgaactaaccttgatctcatcagctttgcattagaacccactctctgactggattaggggctaggttggggtggctgtaacctgaagtatctagaaaatatgatgggctagagaatttcacctktggttgtgtgctggwacactarctgggtaaaagagttcagaggaggatttaggaaaacacctaggctcagtttgagaatgggaagtggtagcgtcatttactrgtcagagtagattaaaatgatgagatcaggtttgaaaagttgagtttaagatgtctctggaggccaggtgtggtggctgatgcctgtaatcccagcactttgaaaggccaaggtaggcagatcgcttgaggtctggagtttgagaccaacctggccaacacggtgaaactgtctctactataaatacaaaaattagctgggtgtggtgccacatgcctgtaatcccagctacttgggaagctgagaatcgcttgagtctgggagtcagagattgcaatgaactgagatcgtaccactgcactccagcctgaatgacagcaaaactatgtcaaaaaaaaaaaaaaaaaaaagatgtctctgggacaggacacaaggtgcctttgagaaatttccttgggtgcarggrtctggagtgcagggatmctatcaggggtggaaatgtaaactcaggagtcctttgctcctctactgagcagtactgcactgccccgccacccaggagacatttggaaatgtgtcagggaggcttggttgtcacgatgactgaggagcactactgcggactttattcagttcatagtgctatcytgcacaacaaagagttgtcctgtcccaaatagtgccctatggggaattatggatggctgagcttgcctgggctgagtgaaccatgtagagtgagaaggaaagaagaggaggacattaccctggagagagccccaacactggaggggaaagggcagaaagagttgtcagcagaggagacccactgtgctgcctcaggtgcacctgcagctcaacacagaccttctgggccctcgccactccttctcaggcatggtcttccaccagcacctccacagtgcccaacccrgaccccsagtgtggtatcactgctcctccatcttttccttaagacaaataggctcagtggcttgggtttggggtcagtagtaaaccagagatagcaactaggaggaacaatcctggggaagctttgaggggaaccacccattttcctctctgcaagaggaccaaaatgaaacccagaatttcctgggcttaataaattgtcagcaratgcattttggggggaaaaaagccttggttggatatgaactacaaaaaagataagaggaagtggggagaatttgactgttttcttcttttgatgtaagaccaccagccacagattaaaaacccttccatttctggctggctggggaactgcagcccagcaaactgtggccgatttaggtatacaggggggcagggtctactgataaaatggttcagtgcctcaggaactcctatgaagggagttgtttggggaaactctcattcctaagatcttttcaaaaaatgtataaattttcaagggaaaagtgtatcatttaacttacatcattatttgctttccaaaaagtgtataaatcattcctaaaatctgaagcaggtttccaaagcattctgaagcaggaagcaatgtctcaacctttcccactgctgccatcctacttgagataaggccaggaaccagccagcgtctggggcagtggttctgtgggggaatgcgaccttagtccactttacttgtcctttaactggcaggaaggaaacctaccacacagcctccctactgcctaaggagactgcaccattctcttctttcttgatgtatggctgcacggaacaaaaaattaaactcctcacctactaattagttaatgatcaccttgaccacagcaaggaggagcatttataaattgggtggtaagtcagacacacactaagaccagtggttttcttttatagttaggagaacaaaacgaaacaacaatctgagacttaaggattttcgcttttcccttcattttgaatagagaaagtttgagagttggagggaggaaaagggactgatgaccaagttgatgtataaagaagcaaacagtgtcagcttgctggggttctctctaaatggaaatagtacgaagttcccaaaccaggctggggagccagagtggggtttagtcccccttctactgctgctagttgtatgactcaacaaattattttccacttcaacttccccgtgaaatggggataatggtagtattcatctttggttgtatgaggattcagtggaaccaattgtgcgtgtgaaaggcctagcacagcatytagcacactgttaatggtatgtgctaactgtggagataagcaggaagccagagcccctgaggacggacacttaaaccatatcagcttaaaaagaggtggatggagaccagggccttcaaacacatgaacagttttcctaaccaaattattataatgtgggcccaggcaataatcttgctttccactgtatttaccagtttaattactgtatgcccctttgatcagtctattgagacccagaagcttttaattaggaaatgaattayrgattcatgaagttagaatrtaaaayagtcaaattagtttttaccccayagaagctatgtttggtggtgggggtggtggraagcttgtttttacaatgtagggttcactcgaatggtaaggaaatgcggggaattaatatrttgactgcctactgcattccaggcatgtgctgggwactttaatacagggctttacaaactgtccacaatgaagggccaattttactttttccagtcggccatggactgatatgtttgcatcaatatatttgaatgctgtgtcacgtcaaaatgctataaacagccaggcacggtggctcatgcctgtaaccccagcactttgggaggccaaggcgggcagatcacttgaggccaggagtttgagaccagcctggccaacatggcaaaaatcctgtctctactaaaaatacaaaaattaactgggtgtggtggtgcacaacctgtaatcccagctactcaggaggctgaggcacgagaatcacttgaatggggaggcagaggttgcagtgagccaagatcatgccactgcactgcagcgtgggtgacagaacaagactctatctcaaaacaaaaacaaacaaaaaaattatataaacatttctaaatgctcctctcaatttctgtacattgcattacaaatcagttcatcaatcaccctctgagtgcactttatctcccttcttcctgaaagctggctcttccttcaggcaggagcatctgaacagggagaagtataggaacaaaacaggctccatttccaggaaacaacaccatggaggggatgtagtcagatttttgttatgatcagctatatgaggagacaataaattaaagggaaaaataataatttcagaatgatgggttaatgttgtttaattataaagggcagaaaaattaatatattggcatcaagtttaaacattactcggaggtccatgaagatatttcttgagtttttgtccattgaggcaacgtattataccttaggtcaaaagaattgctttgacctaagcatttttaaatactcttatttatttttaaaaataagataaatctatatctgtaatacagcacattcaaaatgtctayactttactgttaagattttggggtgagaagcggatggtataatgagagggcatgaacatgggcagctcagatggtcctgkgcatcatgtctgtttctctgagccagctgcttctatgtgatcagattaaaggggctgatagtcatgaagcaggagctggattaaaccagattaccctgatagtgatgagatgcaggctacttaacccttacaagtcagagacacttgagagtgaaaagagaatgtgaaaatcctccagaaaaagagaaattgggtagcagtaagtagcccaaagaaccatctttcttgcttttatcttaattatgttttaacaacaaaacaaaacccaaactggacataccatttcaaattcaaaacaggaaattaaatccagtaaacactcccacctccaccaacagctctggaaaggcaatgcctttgtctgtgaaagaccatgaggcacaaaggtagcattttcctctcaaagtgatgcaagctttttcttggccccttcgccagacctgtggagtactgggcctaccgtgctcaaccccttgtgggagggagcacatgaatgagtgagtgcgggatccagccagctgctccaggcactgacacaggagcaagctccttgaggggaatgcagcagcacccaggtaagggtgtccatgaccctgaagccccagaggggctgttacagtgctcctttatttccaccgtctgcagatggtggcatgttagcagctcagttggccccttgcctcgctgcacggggcatgccactggtgaggggcaaagggccagtttgacagccttttctgggtacctgtacttggtgggccctgagctcttgtccagtgtccaagaagaatgaggtcacgcagatgattgaaggatggtgaaggtggagaattttactgagcaatgaaaatggctttcagcagagaagggaactggagaggggatgggaagggcaggtcatcttcccagaagtcaggttgtctcctccccgaagtcaggtcatttccccctctaccaactgagtctgggatctttataggcacaggataggaagtgcgtattgatgggtttgtgagtatgcaaaaaaggttaacgtgaagacaccatgcaaaggtgggcaaaacagtgtagaaaactacttaggaaaggttaggtatatgtaaaataggtgaagggtggggatcaatcagaggaaagcgtccaaacaggaagacaagttcttgatccagtcccaggatttaacttgtagcttggctttccggctttaaactgtcttctacttggaggtggaatttcactgggtacccacccctatctgcctaggcatttggccacctccttttgctatcaaaagcaggagaagaagcaagcaatatcacaaataggattttaccattccataaaagcagccctattctaaggggagaccctagaattatggatgtaggggaaatttctctttaaaactgcacarcagaaattaagaaggaggagaaatatgtacacgtagatacaatattagcatctaacttagaagtcttttagtgtggctgttrawgctggcagttttccccaaatcaggtttrcactaagaacattaattaccagggaaaatacattcaaattttgcaaagtaatattcaactcaacaattttaaaaaacacagaaatattcartwacatagaccyraacacagtgagcacttatcaagatcacgaacagactagagcatctgacaaagctcagagacttagaatttttgctccatatatagaaccatttaataagatcatgtatggttatgttcatacactttgaattaggaggaaattttaatatatttatccctgatgaaaattaaatagtccttaactatcctgtgtggattcaatgctaggtgctggagaagtgcaaaggagagaaaggagtcacctctccagcctggtgaggacaggggaggcttcttgcaggaggtgatgcctgagcrccagtcccagtaaccaactgcctgttgaacagctgtcatgtcaggttccagcctacttgtgctgactccgaccaggagcccagaggtttcacaataactcaatggccaattaaatgtgaggctttcacataccaacgatmatgcaaatatattcaacacacacaggcagtgataggggaggtcggggsrgccatggtggttcacacytgtaatctcagcactttgggaagctgaggtgggaggatcacttgaggccaggagtttgagaccagcctgggaaagaccttgtctctacaaaaaatgtaaaaagtagccgggtgtgatagcacactcctgtagtcacagctactcagcaggctgaagtaggaggatcgtttgagcccaggagttcgagattgtggtgagctattaatgtgccagcctgggctacagaatgagaacccatctcttaaaacaacaacaacgacaaaaaaaaaaaaacaacagggaatgaaccgtggcaagtagctccagagaccagcacgctgactgatgaacagatttggatttcccttgaaacaacaaagtgggaggagtgttgttgctgttcttctcccagcagaacttatggcagcctctgttcgtgaggaggcctcagagttctcacgggcagagcttctacaggctctcggccatggtcactttctttgctgtttttataccctgcataggaatgtccattgtcataacttagccatcttttggcttcactttcttattttattttataaaattaattttggtgacagggtttcaccatgttgcccaggctggtctggaacttctgagtttaagcaatccacctgcctcggcctcccaaagtgctgggatcaccggtgtgagccatcccgcctggccttggcttccctttcttatcaagttttggggttgcctggccacagcaggtgttgtcatctcagtcctacatacatatgcttatcactttgagcagtcagcagtttcactgtgagctgagtcacttatcattgtgactccattttgttggtggaaacaacccagatgttattcaagtaatgaacattttttaaatgtggcatatagatatatagtggaatattattcagccctgaaaaaagttttgtcacatgctgtgttaaaaataaaccttgagaatattatgttaataaaaacaagccagtgacaaagtgacagatagtgtatgattccacttatatgamataagtagccaaactcacaaaaagtagaatggtgtttgttaagggctgctgagggggtaaaatgggcagttgttacttaacaggtattcagtttcaggtttacaagatgtgaaattctagagatctgttgtataacaatgtgaatatagacaacaatattgaattatacacttaaaaagatttaagatggtaaattttatgttatgtattttaccacaatatatttttataaaacaataactagaagaaaaraagactccattttgagacatttagaatcacaaaacattattatatatcaatagccctacctggatgtcccaagacacctcagtcccagcatgtccaaacctaagtgtctcgtaattcttgtaggaattcagaagtcatcccagatgcctcaattcccacctcctgcgggatctgaaagaaggagagggattaggcaatgggaaatgggtgtagttggargtgagatgggggtgtggtggccaccaggtgaggggtttaggagtctccagggtcactggtgacttgatacagatttgcatttcagcaagattgttatcagcagaacaaagttgaatggagccaggagagcttgggctggagaccagctcaytggaccttgggaggaaattctacctcctactttgacctcaagtttgccaggaccaacacggctagaacaaagcctctcatgacaaaatagccaattgggaaacctttgaattttcctcccacccttaaaacacgcttcaggcactcaagggaaagggaaaatggaagaggaaaggaagaaaaacagggtctcttgcgccctgcaggtgtgcagggcagccctccacaggcccacaggaggcttggcagcagggagcaggtgactgctgtgcatctgggatgagaccagcactttccccacacactgctagctgtcccccacccgaagacagtgggagcacattgcactctttccacaactggcagagtcaagcctaaaaactgctagaatcccttcactttcttccaaatgccagccttgtagagtggtcagattttcttaatgttgatatgaaaaccatgagaatacagttgtcctcggtatcctggagtaggggaaggattggctccaggaaccctttgtggatgccagaatccaaggattctcaagtcccttgtatgtaataaaatggtctagtatttgcatataacctacatgcatcctcscatctactttaaatccccctagattacctctaatacctaacacaatgtaaatgctctgtaaataattgttatacaatattattcatttgcattatgttttattgttgtattgctgttttttattttttgaatatttttgacctcaggtttggttgaatccaggatgcagaacacaacttttccacaaaataatttaaaatacttgtcaaaagataaaatgactgcaatttaatttaaaagattttctttggctttatttgcaattctagaattgggcaacacttcattccataaaatagcctgtgttccagtgaggtaaacagaggaggttggttttacaaacagaaaagagctaaagaaagcagaaacacaagaaaaagcagattggtcatttcggttattttccttgtaaggtgrgaacagggaaatagaacaacagaaaaataactgattggttaagatcaggtttcttcaggtcattattttttattttttggtaaggattaaagtagagggaactttattatcatgctgactgaaactggcctgtttgggatatttggctattatctctcctgatttctctgaaggtcatataagaacttagttttgctttgatgatgtggaactttagtatgagtggctccattttgggtttttaattctgttctcttggggcgctgtgcaggagcaaaacagtggcctcctgtaatttctatttaacatgctttactcttatcaaaaggacaagattgtccagggttggttcaaccatagtgtgarctaattatggaaaaagaactttgattttacttcttttgtaataagagtgaatgtatttactgagtcggcattccctttcatgattatcattatatgaaggaggaaattggggcacacaggggttacataactaccctgaggtcacgcagctggtgggggaagcctgggttgcatgttgacaggcagttccagaatctgagttcactgtgccactcaggttggctggaggagggaaaaggcatcttccttccatttctgcttgtgttgaggctgttgctacaacccaagcaagacgtgttgagggaatcaactcagttatgcaggtggaagtagaggaaaagggaccaatgaygacatagctaggaaatatatatttaggctaatgtaaaaaaatgtatttaggaaaagcaagrtaacatttagtatgtgagaggtacctgagatgattccatgtccccgcagagagtacttcctgaagtatttccatgagttacttcaggagtgggctggtagggcagcgggagcagctgaaggggatagaaggtgagaggtgacagcgtgctggcagtcctcacagccctcttcgctctccgcgcctcctctgcctgggctcccgctttggcggcacttgagaagcccttcagcccaccactgcaccgtgggagcccctttctgggttggccaaggccggagccggctccctcagcttgcagggaggtgtggagagagaggcgcgagcggaaaccggggcttcgcgccgcgcttgcgggccagctggagttccgggtaggcgtgggcttggcgggccccgcactcagagcagccggccggccctgcggttcccgggcaatgaggggcttagcacccgggccagcggctgcggagggtgtgctgggtcccccagcagtgccggcccgccggcgctgcgctcgatttctcgccgggccttagctgccttcccgcggggcagggctcgggacctgcagcccgccatgcctgacccttcccccgactccgtgggctcctgtgcagcctgagcctccccgacgagtgccgccccctgctgcacggcgcccaatcccatcgaccacccaagggctgaggagtgtgggcgcacggtgcgggactggcaagcagctccacctgcagccccagtgcgagatccactgggtgaagccagctgggctcctgagtctagtgggaacttggaggacctttatgtctagctcagagcttgtaaatataccaatcggcactcggtatttagctcaaggtttgtaaacacaccaatcagcaccctgtgtcgagctcagggtttatgaatgcaccaatccacactctgtatctagctaatctgggggggaggtggaaaacctttgtgtctagctcagggattgtaaatgcaccaatcagcaccctgtcaaaacagaccactgggctctagcaatcagcaggatgtgagtggggccagataagagaataaaagcwggctgcctgagccagcagtggcaactcgctggggtccccttccacactgtggaagctttgttctttcgctctttgcaatacattttgctactgctcactctttgggtacacactgcctttatgagctgtaacactcaccgtgaaggtctgcagcttcactgctgaagccagcgagaccacgagcccaccgggaggaacgaacaactccagacgcgccgccttaagagctgtaacactcaccgcgaaggtctgcagcttcactcctgagccagcgagaccacgaacccaccagaaggaagaaactccgaacacatctgaacatcagaaggaacaaactccggacacgtcgcctttaagaactgtaacactcacggcgaaggtctacagcttcactcctgaagccagggagaccacgaacccaccgggaggaacaaacaactgcagaaacgctggcttaagagctgtaacactcaccgcgaaggtccgcagcttcactgctgagccagcgagaccacgaacccaccagaaggaagaaactccgaacacatccgaacatcagaatgaacaaactccggacacgccccctttaggaactgtaacactcaatgcgagggtccgcagcttcattgttgaagtcagtgagaccaagaacccaccaattccggacacaaagagaggagtatatatgtgattaagatatgtatttctgacttgaagtgaaatattctggaaaactcacacaactatggtaaagaagaattactcaattccttttagtcctcttgtagtcactcattaaaagataagaaattcggccaggcacagtggctcacgcctgtaatcccagcactttgggaggcagaggcaggcagatcaattgaggccaggagttcgagatcagcctggccaacatggtgaaactccgtctctaccaaaaataaaaaaaaattagccacgcagcgtggcatgcacctgtaatcccagctacttgggaggctgaggtgggaggatgggaggatcacttgagttcaggaggttgaggctgcagtgagccgagatcgtgccactgcactgtagcctgagtgcagtgacatctgacatcagggactgctgatgagttacaaaaaataaataaatgaaagaaattcgtttaggaaacctttaatatgattgagatgacaaaacctttgggaatgagaaaaaaaagagctgtggagataaaagtgaaagttcaggatctcagagaaactaagaaactttggtagatgagaaataggataaatggaagagtatctgagacagaaaaagattaagcaaacagaggattgtggccaacatcatggcaaggaaacatgaaaagcaaggttttgagcaaccatgctgtaataactttctaaaacattgtagtctccacagtgtgcttagggcaatatttacaaacctacaggctgatgttaaaatggttttgtgctcaggtagcatgtctcctacagagacaggaggcaggagacaagcctgagttgcaagggtaattagaatcagccagaaaaagaatggaaaaagaaagttggtgtgcagggagaggaatttatttgaacttctccatcaagcgtgttctgctacaggcacagcacaggctgtgggcacagcaccctctcgtgtctgggagagtcactgcagctttgctgtgtggtacragcacagctgttcagctctgttaacttgaataaatatttacagtagtgttctctctagtgacccagggcctatttggtgtgcctgactgttgttctaagctttagtcttaccacctctccacctcgaaatggggcgttcaggtctggccaggctggaggcaaggctatgaattgtatgctgtggaactgtctttcagtgtctgtgaatttgcctactagtgcctttagcagggagggtggggtgctctcccatgtttgaaataaagaccttagtctttagtttcaatttaacctgcagtttaacatttcacgcagtataatgcagccataaaaaagaatgagatcatgtctttttcagggacatggatgaagctggaagccatccttctcagcaaactaacacaggaacagaaaaccaaataccacatrttctcactcataagtgggagttgaacaatgagaatacatggacacagggaggggaccatcacacaccagggcctgtcagggggtgggggacaaggggagggagggcattaggacaaatacctaatgcatgtggggcttcaaacctaggtgacaggttgataggtgcagcaaaccagcatggcacatgtatacttatgtaacaaacctcaggttctgcacatgtatcccagaacttaaagtaaaaaaaaaaaaaaatccacgtggtataacagaaggatcactttacacagcggtccctgatgtctgatgtgggaccagcaacaactttgaggaaggttttggtgacaatcagctatcttgaggtggctatttctagactgattacttccttccctcgcatcctcccttccttccttccttccttccttccttccttccttccttccttccttccttccttctgatgtagccagtctaaattattaaaagataaaaagactcccttaagcccttttgcccccatcgggctgctttggatgcagctccaccatttactgccttagtgttaccatgggtgggttcctcagtctcatcacatgaaaaagagacaatagtaggatgtaccatgtagggtttttccgagtattaaatgaggtaatgcctataaagcacacagtacctgccacaaagaagccattgagcaatgtcagctaggcagcaataacattaaagctttgagctttgtttcacaggagaagaggttcaaattagcactgaacctcttcaacagaaagggctcgtaacttgacataagtgaaaacctctgaccttccttggaaacactagtttggatagtggttatttaacaagtacaaacacttgagtttrgggmcaagcagtgtacctgrtgctaaagmgatggaaggcrtggtctttggcttcaaggtatttattatcttgttaggaaaagtaaaaagccactgatcactaagcacagtgatagtaccgagcagcatttgtctagtgccctttggtgttgtttagtgcggtggggctgcctatgaaagtagctagttaggcccttttggaaggaggtaagctttgacagtgcctcctcccagagttttcttcatggggcccagctctgacattctcatcacttgtttggcatctctttgcaccacccctgaaggagaaaagacaaattccaccttggggctacagtagggcacagtggaagcaggcttcatccactctctggtagcatgaccttgaccaagttatttaacttcgcagcttcgaatttctcatttccaaactaagtgctatggtgaggatagagtccaccccactgtctggcacatggcaggttctgtgaacatttccatctctctctcttcctttttttttttgagacagaatcttaccctgtcacgcaggctgaagtgcactggcacaatctgggctcactgctacctccatctcctgggttcaagcaattctcctgcctcagcctcctgagtagctgagactacaggcgcgtgccaccacgcccggctaatttttgtatttttggtagagatgggtgtcaccatgttggccaggctggtctcaaactcctgacctcaagtgatccgcccgcatcagcctcccaaagtgctgggattacaggcatgagacactgtgcccgggtacatctcttttcttgattaccttcaaagaataaaatgaacacttggatttggccactcagtggscttccttgtcactaggactttcctagccygttgacaatgaggaaagaaggcttagtaaaccaacactactacaactactgctgctactgctactactactagctgtgaacaccagaatagctcagattrcttttgaacctgtgagaggggccaaaatgcaggtcttatgtgttcccaaggggcccctcaaatgccacatgggaagtttaggaaaagaggaccaggtatcagtctttgtgcygatgtaaaggaaagaggttggcagcacagacactttctcctacctgtctagcgggaaacatcctcacgtgcaactgtcagaaacgcctgcatcctttccctggaggagtttgtcagaccaaacaaatctgtatctaasaacatgtttttccaggaaggcaggatctgatayrgatggcagatctagaaacccaaagatcccttctgcctagagttacatggactgtgctttttccttagtcctggcgaagttgcaccagtggrtgggatgaggtcagcaattagagtcagctcttcctcagttaggattggcctttggcttgtaggctgtttcctagggagggaacccagcgtcagaacttcatctcaccctgtgacatgtcactactgacaacaagtgtggtcctctgtatgctctrtgagtatgctgggcatgctgctgttgggtccrtcactgtgttatgcagaaaagtgacgaagggctaggcaggtgtgtgcagcgtgccatttagcgtatcccctcaggcatrcacccaggagcagtgtggtctgagcttgtgttaattctaagaagaaataaactawtgatgaaactctaattgtttttaatggaaaatgttcataaggtgaagttmttatgcatgctaaatgattttttcaattttgtttcttttaggagaactatcctatccctgaaccaggcccaaatggtaagttcttgggaaacatgacttatattytrttatttcctgttgtttcctttggagtcacatgtatattgytcccttacctctcttttccaactgtttattacttttgcatccattaaaaacctatgcttttgttaggctgagaacagagtctactgcccacagcatgacctgrtgggaagtttatcttggctgctacatgaaataaaagaacagtgatagaatcagaaaaattaccgtaccagactgctgacttgtcccaaagagtttttgatgtgaagtatatggaccaatgacagaattcttcctcttttgacctaatgacagtgtaccctatctaccagaagctgctgttggagtggccaagtgtcctaaccctaacscaaactttgaaaaggagtgagtctacagaacttaatctttagcaaagggagcatcatgccagctttccccactccccaggaaggccagtcaccaaagtgtggggcagcccaggacctactgtccagtgggggtgggaggkgctgcatgrgkccctgtcccctgccctaatcaaccaagcacagaaagtgagtgagcacactggggcagggtttccaacacctttactccactccttctaggcctctcacttgctaagcctgtggggcttagctgacatgctgacgcccaaggtggcatctgcaacttcccagctttgggtttctcatgtacaaactgagtgctatggtgaggataaagcccagcccaccgtctgcacatggcaggtgctgtgaacatttccatctctttttgtctgttggctcrggcagatccctgctgacagctttctaatccctcccatccctggaattccactttgtcataatcatgcaggaccctgaagtgaggctgggggcaatggtcagagtgtctgtagatactcaccctccccctctcacacctagacagtcaggtcccctttctgcccttgaggagttgggggtgtcctttcccactttgtcctacctcacaccagaaccgcagcttctgggtgaacatcagatcaaaggcggctttcctggtagatccacagctttgctactgaaaggtcagttgtgttatcgacttgtaagtggtaagaatacagactagatagaatatagccattctrtgggtgctgagtaagtattgtatagytagggttcaaggattttcaccaagataccatgttcagagaagtgaaagagttacctcactgtgtcctgaaaagttgaccgttgattccagaagtggccaaacgagggctgtcttggacacagagtasaagcttggctcctggtaacagcttttctccctgaagcagcattctgcttgcactctcrtctcttgctacacttgcattggaagggaaaagagtgcatttcagcgagtgttctagcaagtcaaatctaatctctcrctaccaattgctacttcaagagaggaaattctgagatgattttcctaactcaaatgccttttccctgcatttgacctgagaattcaccctgccatttcttactcttcactaaaactaaggaggaagaaagttctgaagagccacccctggcagtctgtggcaagtgcagtgcatagcagagatttgggtctctttgtctttctaaggcagagtgtttttttcagggaggtattcataaccatcatctgagtcagagatgatggtacttattggtacttatttcaccaaaggggctcagtaccatctttattttaaacttagaaaactrgccaggcgcggtggcttaggcctgtaatcccagcactttgggaggctgaggcaggcggatctcctgaggtcaggagttcaaggccagcctggccaacatggtgaaaccccgtctctactaaaactgcaaaaattagccgggcgtggtggcgcatacctgtaatcccagctacttgggaggctgaggcaggagaattggttgaaccggggaggtggagattgcagtaagccaagatcctgccattgcactacagtctgggcgacagagggagactctgtctaaaaataaaaaataaataaataaataaataaataaataaaggaaagaaaacaataggcatgaagaactcaacttgatagttcacaaaatgttgccaagctgagattctaccagaccttttctcataaatagatasgaatccacgaatcacgcgtagcatattaattgtctggaaagttatcttttggaaaatagtttgttctcttaagtggttggtacatttcatcctactaatgatatattgtttacccagtgtattggttagtgttgtccagagaaacaaaaccactaagatatatgtgtatgtatgtatgtgtgtatgtgtacaaagggcaggctggaaattcaggtaagagttgatgttgcagtcttgaggagaattccttctccttcagaaaacctcagtctttgcctttaagaccttcaaactgattggatgaggctcacccacattatggagggtaatctactttactcaaartctattggtttaaaagttaaccatgcccaacacgtatcttcaaacaaccaggcactatagcctagccaagtggacacataaaattagccaccacatgtggaagcttgtttgccttgcgagacttaatcagggttgctatggagcttgatttcctctgtggcctaaattgtgtacctggcctggtaacccagccctctaccctgggcaaagggaaatcactaggtcacctcagagtgataggggttgttccctctctcactggttttttcttcctttnnnnnnnnnnnnnnnnnnnnnnnnnnnnnnnnnnnnnnnnnnnnnnnnnnnnnnnnnnnnnnnnnnnnnnnnnnnnnnnnnnnnnnnnnnnnnnnnnnnnnnnnnnnnnnnnnnnnnnnnnnnnnnnnnnnnnnnnnnnnnnnnnnnnnnnnnnnnnnnnnnnnnnnnnnnnnnnnnnnnnnnnnnnnnnnnnnnnnnnnnnnnnnnnnnnnnnnnnnnnnnnnnnnnnnnnnnnnnnnnnnnnnnnnnnnnnnnnnnnnnnnnnnnnnnnnnnnnnnnnnnnnnnnnnnnnnnnnnnnnnnnnnnnnnnnnnnnnnnnnnnnnnnnnnnnnnnnnnnnnnnnnnnnnnnnnnnnnnnnnnnnnnnnnnnnnnnnnnnnnnnnnnnnnnnnnnnnnnnnnnnnnnnnnnnnnnnnnnnnnnnnnnnnnnnnnnnnnnnnnnnnnnnnnnnnnnnnnnnnnnnnnnnnnnnnnnnnnnnnnnnnnnnnnnnnnnnnnnnnnnnnnnnnnnnnnnnnnnnnnnnnnnnnnnnnnnnnnnnnnnnnnnnnnnnnnnnnnnnnnnnnnnnnnnnnnnnnnnnnnnnnnnnnnnnnnnnnnnnnnnnnnnnnnnnnnnnnnnnnnnnnnnnnnnnnnnnnnnnnnnnnnnnnnnnnnnnnnnnnnnnnnnnnnnnnnnnnnnnnnnnnnnnnnnnnnnnnnnnnnnnnnnnnnnnnnnnnnnnnnnnnnnnnnnnnnnnnnnnnnnnnnnnnnnnnnnnnnnnnnnnnnnnnnnnnnnnnnnnnnnnnnnnnnnnnnnnnnnnnnnnnnnnnnnnnnnnnnnnnnnnnnnnnnnnnnnnnnnnnnnnnnnnnnnnnnnnnnnnnnnnnnnnnnnnnnnnnnnnnnnnnnnnnnnnnnnnnnnnnnnnnnnnnnnnnnnnnnnnnnnnnnnnnnnnnnnnnnnnnnnnnnnnnnnnnnnnnnnnnnnnnnnnnnnnnnnnnnnnnnnnnnnnnnnnnnnnnnnnnnnnnnnnnnnnnnnnnnnnnnnnnnnnnnnnnnnnnnnnnnnnnnnnnnnnnnnnnnnnnnnnnnnnnnnnnnnnnnnnnnnnnnnnnnnnnnnnnnnnnnnnnnnnnnnnnnnnnnnnnnnnnnnnnnnnnnnnnnnnnnnnnnnnnnnnnnnnnnnnnnnnnnnnnnnnnnnnnnnnnnnnnnnnnnnnnnnnnnnnnnnnnnnnnnnnnnnnnnnnnnnnnnnnnnnnnnnnnnnnnnnnnnnnnnnnnnnnnnnnnnnnnnnnnnnnnnnnnnnnnnnnnnnnnnnnnnnnnnnnnnnnnnnnnnnnnnnnnnnnnnnnnnnnnnnnnnnnnnnnnnnnnnnnnnnnnnnnnnnnnnnnnnnnnnnnnnnnnnnnnnnnnnnnnnnnnnnnnnnnnnnnnnnnnnnnnnnnnnnnnnnnnnnnnnnnnnnnnnnnnnnnnnnnnnnnnnnnnnnnnnnnnnnnnnnnnnnnnnnnnnnnnnnnnnnnnnnnnnnnnnnnnnnnnnnnnnnnnnnnnnnnnnnnnnnnnnnnnnnnnnnnnnnnnnnnnnnnnnnnnnnnnnnnnnnnnnnnnnnnnnnnnnnnnnnnnnnnnnnnnnnnnnnnnnnnnnnnnnnnnnnnnnnnnnnnnnnnnnnnnnnnnnnnnnnnnnnnnnnnnnnnnnnnnnnnnnnnnnnnnnnnnnnnnnnnnnnnnnnnnnnnnnnnnnnnnnnnnnnnnnnnnnnnnnnnnnnnnnnnnnnnnnnnnnnnnnnnnnnnnnnnnnnnnnnnnnnnnnnnnnnnnnnnnnnnnnnnnnnnnnnnnnnnnnnnnnnnnnnnnnnttttttttttttttgacgggagtctcgctctgtcacccaggctgggagtgcagtggtgcaatctcgccttgctgcaacctccacctcctggttcaagtgattcccgtgcctcagcctcccgagtagctgggattacagacatgcagcaccatgcctggctaatttttgtatttttggtaaaggctgggcttcaccgtgttggccaggctggtcttgaactcctgacctcaagtgatctgcccacctttgcctcccaaactgctgtgattacgggcctgagccactgcacctgggctatttatttcattcttgtaacaattctatgagataggcattattatcttcattaattgaagaagaaattgaagcctggttattgcccagggtcactcactagttggtctcagaactgggatacccaccctggtcttttggactctagagcaagtgctcagaaccactgggctacccagcatcttcatacttgagaaaggttttatatttgagttattgaagaggtcagagctaatattctagttaagaggaagcgaatggctgggtgcagttgcccatgcctgtaatcccagcactttgggaagctgcggtgggcaggtcacttgaggtcaggggtttgagaccagcctggccaatatggtgaaactctgtctaaaaatagaaaaattagccggacatggtggcacacacctataatcccagctacttgggaggctgaggcaggagaattgcctgaacccaggaggtggaggttgcagtgagctgagattgtgccactgcatgccagctttccagccttggtgagagacagagcaagactccatctcaaaaaaaaaaaaaaaaaaaagaggaagtgaacaacaaaattacagatatgagagtaacacatctgggtacagataagtctgtgctactcagagcagaggttttgtgttggggagttattggagatgataaacatgcataatctttataaaagtccccctttaaaaagcacttggctgggcatggtggcttacacctgtaatctcagcactttgggaggccgaggcagaaraattgcttgagctcaggagtttgagaccagcatgagcaacagagggagaccctgtctctacaaaaaataraattagctgggtgtggtagtgtgcacctgcatttccagctactcaggaggctgagacagaaggatcacttaagcccrggaggttgaggttgcagtgagccatgattgcaccactgcactccagcttgggtgacaaagcaagactctatctcaaaacaataaaataaaataaaatttaaaaagcactgtaaaactgtgaaatgtcatgttatcataatataatcataattagaaggtaaaactgaataatatgaaaactccacctgattatggaggatcttgaaggctaggtggaagaattcatccttaatgacataggcataatttgcagaaagttcactggacaggagagaaagcagagggagtcagaggagatagaaggaagagacaaatatagacattttattttttcgagatgaagtctcattctgttgtccaggctggagtgtagtggtgccatctcagctcactgcaacctcagcctcccaggttcaagtgattcttgtgcctcagcctcctgagtagctgggattacaggcacgcaccaccacacctggctaatttttgtatttttaatagagaatgggtttcactatgtttgccaagctggtctcaaactcctgacctcaggtgatcagccctcctcggcctcccagagtgctgggwttacataggcataaaccaccatgcccagctaaatacagacatattttggtggtcataaagatttctgtgggtccttttctttccttaggatacaaaatttggatttaaagtctttcatatgttaacttggacttaaaattctaatcaactaatctagaaagaagaccacaactcatcaaatatttcctaatgcgcatttacagaatttaaacatataagtcagccgggcataatagctcacacctataatcctagcactttgggaggctgatgcaggcagatcacttgaggtcaggagttcaagatcagcctggtcaacatggtgaaaccccatctctactaaaaatacaaaaattagccagacgtggtggcatgcatctgtaatcccagctattcaggaggctgaggcaggagaatttcttgaacctgggaggtagaggttgcagtgagctgagatcatgccattgcactccagcctgggcgacagagcaagactctgtctcaaataaataaataaataaacaaacaaacagacatacatacatataagtcaataactctaaggcatggaagcattcctatttttttttaagactagtcaagtgcagtagtgagaagtggggaaagagtagaacaaggagtattatctgtaactgagtatgaacaaycaattaagatgatgcactaccttcagaccagccttcaccacttattttaatgagcactaactatgtaccaggactctacactattctgtgagtactttcaacacaaaaagacttaggaaaaattgtttattatktccctgctgaataaaggccagaccttccatggcctcagcaggcctcaccaggttcctaacatcctcttcaggctccagagggcccgaacactagtacagaggtgagcagacagtcaaatctccacagcttatcactgtgtgaccacctgagcttctgtttcctcatcgctaaagcagagataacaccatcttgttggtttatggtgagggaagggagattttgtgatgtgcctttcctggtacctggcacacaatgggcatttggtaaatggcaggacttgatcccaccattattggtaaactctattctgtgtagtaggtttaagcacctcttcccagtggagtctatccrtcagacctttcctgaataaccaggtactgaggcaggataaggcctgtgggtcctttcctggctcctgccacatggcttcctgcctcactggcattcagccgtgttggtctccagcttgttcctggctgctagaaggggagatttctgctgttctctgtggagttagtgtctgggytcaggcagggggtctgccagggtttctagtttggtctctgattcgctggtatgggtcactccccagattcagacggagtttaaatccaattgtaactttgatgtgtagcaatacctgtgatattaaaatcccctgtaaatctgctttctattttctgcaaacatggaggccattgctgtattgacagtgtatttggagttcccctacacagggctgggtatctgcatgaagatgaaccatctaaaccatcccaaaacctcaggataactatttgtcctcaattattcctacctgtctccctttcctttacaacagaaaagtgctactgtctttaaccaacaggttttacttgtcacattccaggggaaatttttgccaataagtaatgyccttctagatactaatgacatttgtgtcccatggtttgttttcccccaatccacaaattctatgtttagcaataaaaatttgtctagcacaacagtagacactatggaaaaataaatatggagcagaagactgactaatcctgaggcattcccatccttgatgaggaggcaaaatagtcatgaaaaacaactagagatggacatggtggcttacacctgtaatcgcagcactttgggaggccaaggcaggaggattgcttgagcctgggggtttgagactagcctggggatttgagactaacctgggcatcatggaaaaaccctgtctctgcaaaaacaaaaacaaaaatcacccaggcatggtggcatgcacctatagtcccagcgacttgtaaagcagtctagggtcaacatarcaatctcactgtctaaggtgttatccagagttctttgtctcatgaccaggaaaattaaggagtgtggacaccaagagtgaggttggaacgaaagtttaataagtgaaagaagaaagctctcagcagcagcgggggtggagggagggggcagcaaaagagggttgctgtttcacagttgaatacaaaggtttttataagaaacttcccttatctatgtagctgcctacgtaacttcccttatctgtgtagctgcgtgtgtagcttcccttatctgtgcagctgtgagcatgtcttaggcaagcacagggtgcagcttctcttttctcagcaactgcgagtatgttttaggcaagcccctgcccacccccttgcaagttcccatggagcccaccatgtacatgcctgaaaaggggaggaaactttttcctgggagcccactgattacccgaagaacagaggcatttctatgtttggccttgcttccttatctgtgcctgcagcttgatttttccaggctgctcttttgttggaaagmatttcaccaaggacctgccctaactgtgtgcctaactggtttttttctttctcgttcctcatctcccacctcaggagtggagactctaactgctgttagggaggtagggcgataatctctctggctactttctgctggaggtgggggttgtgtgggggacagcagccagggttccttctggggcttatctaagggtcctcagaagaaaggtgtgtctatgtgtggttycatttgcatcaccatttggagtttgataacctctaggcgagaaaaaacaatgtgggttattagaagacatatatcaaaacaagacaagggggtaagaaaagctcaaaamtcccaaagctgacaatgtgcccagataactggcagctatagttaygcctgccaagatttgggtgcatgggacttggctttggttagctcccttggtcttattttcccaaacaaggaaacctctgagttatgggctgcccattcattcccatcatctggcaggatttgcaggataattgctcagaattaaaatattgatccagattttttatattactgatctcttttgtttcttctgagttgcagccagagatcgctgattggttcacaggaataagcatggttagtctaaaatgtaggctaagtttttaagtaaaaacttaaaactaatgagattagaatttaatggacaaatgtatgataagttttgaagcatatttttctcttgccagtcctcacttttgtcaaaaacaaatcacagtaagactgagttgtttgcaaaataaactttagtcttatacttggcctgattatttgcataaagtacagcaagaataattatttctacataggcttttaaaattggctttgatgaaactctgttttgcgaggaacttcagataggacttttctttttttttgagacggagtctcgcactctcgcccaggctggagtgcagtggcgccatctggctcactgcaagctctgcctcctgggttcatgccattctcctgcctcagcctcctgagtagctgggaytacaggcacccaccaccagccctggctaattttttgtatttttagtagagatggggtttcaccgtgttagccaggatggtctcgatctcctgaccttgtgatccacctgccttagcctcccaaagtgctgggattacacgcatgagccaccgcgcctggcccwacttttcaaagctgagcccagccatggatttgtatactcaaatacctatgagttgggcaaattcctctcttcttgaggtcaaaagaacatggagcctgttagaaagtgacattctttactcaccacagtttaggaatcctgtacagggactgtgtagacaagatatgaagccagttttcccaaggggcatttattggctctgcaactccagcttgatttttwaaagggaagcatactgttccagtcaaagccttggtaaaacaactagtttctccagttgtgtcctgttgtaaaagaagatggattcttactgcgctgatggaaacaactatattgccataaatcaagaatactcacaaatagtttccaaagtctagagaaactggcagaaagaaacaaacatactccaaattttgttcacaggagtatacattactgaattgttaaaagctgtagatagctcaaaagaaaaattcccttgactctgaaaaacaaggattagcaatgttttaagcagaaagttaaaaaggattagttcagtyttctattagttcagtccattccattaatacttgctctgcatgatattcatgaacatttcagttcttcatgagtcctatacatttttcctctattccaatgtcacaatctccaaggttatcagaaacctgcatttgagagcacctatcaaagtcctatagctgattataaactatcttttgaagatgattaaaacaagacaacaattgtctgtgaatgacaaaatatccagggtagctacagttaaaaacacaattgacaaagaaatttggttatctctgtggtttacaataatttacacaataaccttaattawgattgatagcaaatactcagacattagaattttagatattctatacaattttggaacataatgttattcactaaaatataacctaaagaagattaaacatgactttggcaatcccacgtaactaaacatgtcaaatactcctgtttacctctcttttggatgctccaggggcccgctataatacccaaaagcttgggattagaaaagacaaccttgaaactgaagtttgatttgggggagcctgttaaatatgttagcggttcaaagcacttgatattatgaagtacaattacggattactataaactatttattttagccaaagtcatgaccaaaacattytaaaacaaggcaaaaaccttcactcattaagagggaggacttagcttccaracaatctgtctttaatgttacatgaaaatcctgtgcaagaggagaaagccaaatttcacccttgcgttagtctactattaatgtcaaccccaacttttttaatgaaaccttagagataattctatcaaatcttacccagtttgatcatgaggtgagattcttgtaaaccttttataactctctacaaatttttgttaaggagcagatcagtgcctcgagaaagccttgttgtgcttttatttcaatgctcaatttaygtaaaaaacatagaatacccttctgaatttagtcaatatattcagacacagaatttcctttgcaagattaatttttataatgcttccacaacttgctcaaaccttcagctttatcttaacctaattcaaaacaayccttwatttctaggcaaaatttacatttccatgtcttcttataatcttttaccaaaacacattttactttccttacacaccttgcatgtaaatctattttcagtagtctctaatttcctctgggaggaaagtggctgggcttaggcaattaagtggactgtagatccttccagcagcaaagcctgatatgtgaggaagcaattgtctgttagccagagactccaatgtagctggatgcagaacaggtgcctcaaacataaggattgaatggctgttctccctgtgatggggatggggacagcactgaggctaaaagttgtctctcaagggtggcttcctcttgactattgaaggtggaattttgctgtttacagatggggcatggagcctggtccctaatagagggatgtaggagggagagaaattggggaactagaggccttggacaaagggccaatagtgccctccacagagaaaaatcccatttcactaggtggcatggtagggactgaaatgttaggtaaaaactctgactctaaattttttccaggcagaggttagaaagaggtttggggtttgatagtctacccccacagtatgcctcttagcaaaagaaaattgtctcayagagtaactgttcaaattcattgggcagacagagtctcagccttgccactgctgcccccaccacccagagactgctgagcccctgtctatccaccgccaccacccacttcagacactgaacatccagtcatggataaaaatgagctggttcagaaggccaaactggctgagcaggctgagcgatatgataacatggcagcctgcatgaagtctgtaactgagcaaggagctgaattatccaatgaggagaggaatcttctctcagttgcttataaaaatgttgtaggtcatcttggggggtcatctcaagtattgaacaaaagacagaaggtgctgagatagaacagcagttggctcgagaatacagagagaaaattgagacagagctaagagatactgtctcttttggaaaagttcttgatccctagtgcttcacaagcagagagcaaagtcttctatttgaaaatgaaaggcaagtactactgttacttgcctgaggttgccgctgatgatgacaagtaagggattgtcaatcagtcacaacaagcataccaagaagcctttgaaaccagcaaaaaggaaatacatccaacacatcctatcagactgggtctggcccttaacttctctgtgttctcttatgagattctgaactccccagagaaagcctgctgtcttccaaagacagcttttgatggagccattgctgaacttgatacattaagggaagagtcatacaaagacaaaacactaataatgcaattactgagagacaacttgacgttgtggacatcagatacctaaggagacaaagctgaagcaggagaaggaggggaaaattaaccagacttccaacttttttctgcctcattctaaaatttacacagtagaccatttgtcatccatgctgtcccacaaatagtttttgtttacaatttatgacaggcttatgttacttctatttgaatttctttcttctttaaattttttattttattttattattattatactttaagttttagggtacatgtgcacaatgtgcaggttagttacatatgtatacatgtgccatgctggtgtgctgcacccattaactcatcatttagcattaggtatatctcctaatgctatccctcccccatccccccaccccacaacagtccccagagtgtgatgttccccttcctgtgtccatgtgttctcattgttcaattcccatctatgagtgagaacatgcggtgtttggttttttgtccttgcgatagtttactgagaatgatgatttccaatttcatccatgtccctacaaaggacatgaactcatcattttttatggctgcatagtattccatggtgtatatctgccacattttcttaatccagtctatcattgttggacatttgggttggttccaagtctttgctattgtgaatagtgccgcaataaacatacgtgtgcatgtctctttatagcagcatgatttatagtcttttgggtatatacccagtaatgggatggctaggtcaaatggtatttctagttctagatccctgaggaattgccacactgacttccacagtggttgaactagtttacagtcccaccaacagtgtaaaagtgttcctatttcaacacatcctctccagcacctgttgtttcctgactttttaatgattgccattctaactggtgtgagatggtatctcattgtggttttgatttgcatttctctgatggccagtgatgatgagcatcttttcatgtgttttttggctgcataaatgtcttcttttgagaagtgtctgttcatgtccttcgcccactttttgatggggttgtttgtctttttcttgtaaatttgtttgagttcattgtagatgctggatattagccctttgtcagacgagtaggttgtgaaaattttctcccattttgtaggttgcctgttcactctgatggtagtttcttttgctgtgcagaagctctttagtttaattagatcccatttgtcaattttggcttctgttgccattgcttttggtgttttagacatgaagtccttgcctatgcctatgtcctgaatggtaatgcctaggttttcttctagggtttttatggttttaggtctaacgtttaagtctttaatccatcttgaattgatttttgtataaggtgtaaggaagggatccagtttcagctttctacatatggctagccagttttcccagcaccatttattaaatagggaatcttttccccattgtttgtttttctcaggtttgtcaaagatcagatagttgtagatatgtggcattatttctgagggctctgttctgttccattgatctctatctctgttttggtaccagtaccatgctgttttggttactgtagccttgtagtatagtttgaagtcaggtagcgtgatgcctccagctttgttcttttggcttaggattgacttggcgatgcgggctcttttttggttccatatgaactttaaaatagttttttccaattctgtaaagaaagtcattggtagcttgatggggatggcattgaatctataaattaccttgggcagtgctagcaagactaataaggaaaaaaagagaagaatcaaatagatgcaataaaaaatgataaaggggatatcaccaccgatcccacagaaatacaaactaccatcagagaatattacaaacacctctatgcaaataaactagaaaatctagaagaaatggataaattcctcgacacatacactctcccaagactaaaccaggaagaagttgaatctctgaatagaccaataacaggctctgaaattgtggcaataatcaatagcttaccaaccaaaaagagtccaggaccagatggattcagagctgaattctaccagaggtacaaggaggaactggtaccattccttctgaaactattccaatcaacagaaaaagagggartcctccctaactcattttatgaggccagcatcatcctgataccaaagccgggcagagacacaaccaaaaaggagaattttagaccaatatccttgatgaacattgatgcaaaaatcctcaataaaatactggcaaaccaaatccagcagcacatcaaaaacttatccaccatgatcaagtgggcttcatccctgggatgcaaggctggttcaatatacgcaaatcaataaatgtaatccagcatataaacagaaccaaagacaaaaaccaygtgattatctcaatagatgcagaaaaggcctttgacaaaattcaacaactcttcatgctaaaaactctcaataaattaggtattgatgggacgtatctcaaaataataagagctatctatgacaaacccacagccaatatcatactgaatgggcaaaaactggaagcattccctttgaaaactggcacaagacagggatgccctctctcaccrctcctattcaacatagtgttggaagttctggccagggcaattaggcaggagaaggaaataaagggtattcagttaggaaaagaggaagtcaaattgtccctgtttgcagatgacatgattgtatatctagaaaatcccattgtctcagcccaaaatctccttaagctgataaggaacttcagcaaagtctcaggatacaaaatcaatgtacaaaaatcacaagcattcttatacaccaataacagacagagagccaaatcatgagtgaactcccattcacaattgcttcaaagagaataaaatatctaggaatccaacttacaagggacgtgaaggacctcttcaaggagaactacaaaccactgctcaatgaaataaaagaggatacaaagcaatggaagaacattccatgctcatgggtaggaagaatcaatatcgtgaaaatggccatactgccccaggtaacttatagattctatttgaatttctatatttcccatgtggtttttatgtttaatagtaggggagtagagccagttaacatttagggagttacctgttttcattttaagtggccattatggggatgtggaatttttatacaagttataaatgtttggcatagtacttttggtacattgtggcttcacagggccagtgttccatatctaagcaaagaaacttccatatttaagcaaagaaaactgcctatgtattggtttgtcctgctggggagtaaaagggatcattggttccagtcacaggtgtagtaattgtgggtactttaaggtttggagcacttacaaggctgtggtagaaacaattatcccatggatcccacgtgttaaaccatgcatatctgtggaatactcaatctcaatgcgcacacctttgactacagctgcagaagtgttcctttagacagtcgtaacccattttactctggataagggcagaaacagttcacattccattatttgtaaagttacctgctgttagctttcattaattttgctacattcattttatttgtatttaaatgttttagacaactgaggaacaaatgtgaaagtaaagatgcagtaaaactgaattggctgatattcattacttatgtatatcaagcacagcagtaaaacaaaaacccatgtatttaacctttttttaggttttttgcttttgtgatttttaggttttttgcttttgtgatttttttttgatacatgcctaacatgcatgtgctgtaaaatagttaacagggaaacaacttgagatgatggctaggtttgtttaatgtcttatgaaattttcatgaacaatccaagcataattgttaagaacatgtgtattaaattcatctaagtagaataaaagttttatgaatagaaagaaagatttggctgggcgtggtggctcacgcctgtaatcccagcactttgggaggctgaggtgggcagatcatgaggtcaggaagtggagaccatcctggctaacatggtgaaaccccgtctctactaaaaatacaaaaattagccgggtgtggtggcaggtgcctgtagtcccagctacttgggaggctgaggcaggagaatggcatgaacctgggaggcagagcttgcagtgagcccagattgcaccactgcactccagcctgggcaacagagtgagactctgtctcaaaaaaaacaaaaagaaagaaagaaagaaaaaagattcactgggcagtgctgggcacaaagcccaaatggagaggagggtattcactgagggtgaaatatcctcccatacagtgccatgaatgcctatcattgggggacaaaaaggtccttactaggtgaaaatttagactgaaatcttgaattctccctgtttctaggaaatcacaaaaacagcaattctttgagttactttcctggttactaaggcactggctgattctatccaacaaaattatattcccaggttctaaaaacaccttcagcatagcatacaaagaagggataggagacatgatagtcacaaaggagagaatggaagaaaatgtgataggaaagactggaagtcctggtgccgacaccgtgatgggctgtcaggaactggagttagttcggggkccttcagataacactgaggtgtagcctcaaccagaaaccttcagttgtcccaggacctccttccaaccctatgtgatggctaggtcttccatgaatggaaactggattggaacacagctgacattcccagcacccaagggcgatgggggattgacaaaatactytccagcaagcctgtcctytgagtcttacagatctggtggctgcactaaccactcttaactgaccaacagaggcctggtatttgtttgattttgagagaaaaaaaaaaaaactatggataagaaactgcagaaagtaaagtactggggggctgctcctactcacccttctgacatatcccagatgaccccctacaggtgaagcagtctagggtcagtgtagcagtctctttgtctgaggtgttatccagagttctttgtctcattaccaagaaaattaaggagcatggacaccaagggtgaggttggagtgaaagtttaataagtgaaagaggaaagctctcagcagcagagcaggagacctgaaagagggttgttgttttmcagttaaatacgaaggtttttataagaaacttcccttatctgtctaggtgttgtgtaacttaccttttctctgtagctacctgtgtagcttcccttatttgtgcagctgcaagcatgtattaggcaagcacagagtgcagcttctcttgcctgagcaactacgggcatgttttaagcaagcctccaccccaccccatgcaagttctcatggagcccactgtgtacatgcccaaaaaggggaggaaactttttcctgggagtgcactgattacacagagaaccaaggcatttctatgttgggcctcactcccttatctgtgcctgtagcttgatttttccaagctgctctttatgtgcctgcagcttgattttttccagactgctgttttgtttgaaagaatttcaccraggacctgccctaactgtctgcctgctttttttctttctccttcctcacttgggaggctgaggcaggaggaccacctgaacttggggaggttgaggctacagtgagctgtgattgcatcactgtactccagcctgggtgacagagtgagatcctgtctcaaaaaacaaacaaaaaaaccaaagaaacatgcacaaaaaaaaaaccccaaaaaaccagcaatgagaaaactggaaacaaccaggttttttccatcaataagagaatggtgatactgactgtggtatactcttacattggaacactattcagccatgaaaaggaacaaactgtcatttgtttttgagacagttttgctctgtcacccaggtgggaatgcagtggtgtgatcatgtctctctgcagcctcaacctcttggsctcaagtgattctcccacctcagcctcccaagtagctgggaccacatgcacacaccaccatgctcagctaattwaaaaaattttttttgtaaagatgaggtcttcctatgttgctcttgaactcctgggttcaagtgatcctcctgccttgacctcccaaagtgctgggattatgagattataggcatgagccaccacacctggccagacagttaataccacaacaacatagatcaatctgaaaagyattatgctaactgaaagaagcaagattcaaaagagtatctactgtatgatcccatttttgtgatgtgctagaacaggcaatactaatctgtggtacaaaaaaaagtcaaaacattggtgtcctctggggatggggctggggattgactgggaacagatacagaggaataagatttctgaggtagtggtagtgttctgtatcttaaaaggggtttgcattcctaggtgatacctttaaaaaagaaccataaacaaatactgaactctagttaatgatatgcaggctgaagcatttaagggtgaagtatactgatgtctgcagcctgctttgaagtgcatcggaaaagaagatagactgatggaaggagacagagatgagacagaggggtagatggatagatatgtgataaagtgaacatagctagatgttccttgaagaatgtaggaggagggtatccaggtgttcgctatacagttctttgaattttgctgtatgtttgaaattcttcataataaaaagatagaaaaaataacaattagagagcagttctcaggctgggtttccaagcaggtgtagtgaggcatagaatagaaatataatagagctggctgttcagaagcctcaagtattactctctactgtaccagagtcctctgcaggtcattggcctttgcagttctactaccaggaatcagttgactcctaattattgtctaaaaatgaccagactggacataaaacatgctgtaattatagctcttgtctttgtaaaggttttgctttctatcttccaaacagatgaagaaaaaatgcccgcaaactccatgtattagctaccccttttccagcagtgtgagatgggaatatacttggcttgccttagctgggaagtggctgtggagatagaggggtggcttggcttgttgcaggagctggaaaaagggcaggccacactgggctgtggaggagggggctggtccttttcccccagagtgactctgtgcttcatcccaagtttcctcacttgcctaggacaccctgggtccccagggaggagggtggctcgttaagctagattctctcatctggcatctgcccatgagcatgcaagccttcataacatctctgcttctgctgttttcaaaggttggaaaacaaagaaccrgaccaaagagsrggcagactctgctcccaccytcggacatggtgccatctttgttttcctctccaggtgatcgtgttgccatcgagcctggtgctccccgagaaaatgatgaattctgcaagatgggccgatacaatctgtcaccttccatcttcttctgtgccacgccccccgatgacgggaacctctgccrgttctataagcacaatgcagccttttgttacaagttagtgtccacagtcccactgggtcacctgggacctctttcccttcattagcttggtgctgtttcctgtggttatttctttattcttttcagctcataattccaaacatgaggcatcacctggacaggctactcttcttggtggcattgagagagggtagcctccctaggaataagactgactcacagtggttggttttagtctttcagtttcagtttcccttacttagagcaacaatagaaaattattgctgaaatcactcaccctctgcagacatcctggagggaattcctgtggttcatcctctgttattagtttccactgcaaccaccagaaacgtcataacaacaatgacctcggccaggtgtggtggctcatgcctgtaatcccagcactttaggaggccaaggccagtggatcatgagattaggagatcgagaccttcctggctaacacggtgaaaccccatctctactaaaaaaatacaaaaaattagccaggcctggtggcaggcacctgtagtcccagctacttgggaggctgaggcaggagaatggcttgaacacgggaggtggaggttgcagtgagccgagatggcgccactgcactccagcctgggcaacagaccgagactccgtctcaaaaagaaaaacaacaacaatgacctcgacaatagcaacaacacaccatgacagcaacggctgacatttcctgaggtgtggtgtgctgccagggcttgagytctgggatcctggatctactccctcctggcaagtgattttggagaaattatttcacttttctctgattcagtttcatttaatcgccaaaatattaaataaggtgatgcatggagagtcataattattattactatgtgcctgcccttgtgctaataagtggtttgcatgcttcaatttatttaatctccacaagaataatggtgaggtgggcaccgttattgggttaaccaaggcagaaggaagctcattgacttgggcacagagcacaaccaagagtcaaactggggtctctgtgagtctcaagctcctgccctgtgcccactcccctaccctactccgattctcacccctgaaattgtgaagttgagtctggaggaagcaaagtgcctccctttctgcgtggccccccatggccccagccgtggagctctagggtgccgaagtgccgctttccccctgacccaacccagatgcattcttcccccaccgcagcctggccccagtggtggttttcagccaggatggggcttgtccggtggaggccaggtgccagtcacaggagcagtctgacagatctgagtttttctagggcccactgggagccttgagaggagtcacaggccagagaccttgtgatgggtttaagtcaacacctgaacctgctctagaagtaagcaggttacatgtgcagagtacacctttcagcaagtggttcctgaatgggcccatctttctggggccctttccaagtcaagacaccaaacgaaagtttcatggaaggcagaagagcatagtggtgaagcccactggtctctgccaattacaactgtgtgaccttgggcaagtcacttaaattttgtaacctcaatatcctcgcctgtaaaatagaaatagtaatggtacctccctcacagaattactgatgagatccaatgagaaaagcatatcaagtctccagcatgaggtctggcacatagtaaatgctcagtaaatggtacyaagctatgccatagtcatggcctagtggtctgggcatggaggtgcaggagtaggcctgaaagagagccttgtgctggtggtttatagggaatgatggggctctggctggcagtggcagtggcagtgggggtgctgaggaaggtctctggggagtcctacagccctgcctttcttctcctcccagggggctttctgcctgtgtccccagttcttccctagacccaagccctcctctctgatgtctttttaggattcccatactaccacagcctctttatttttgtatctattttctttctattttcctgcttcctccttggcttcttgatcatccgttacccaatttggactgttccctgaaccccattgtaaaaactaccaagttgcctcatcactctctggtgtttataaagcatgaaaggttggggctgggaagaaacttggagtcttctcatcctcgttctccatcaacccccactggacaagattggggagggtggagtcagtggttttcccaaggtcagtggcagcggggctggcctccaggactccttgtgcatgcttctgcctccacaccaggtggctttccaacacggttggctgtgttgggtgcaggcggatgaggcagcatctgcttaatcagtagagtattcttcctgataacaatcttccctcatcaccttccccaatcccatctctcctcgatgtagtttccacgcaagccaccctctgcatagagcccttatragttcctcaggaggcccagatgtggaagggcaggcgtgtctaggaacctgtggagtccctgagagagtttaggaatcttcacratttcattttcacctttttcctattatatagaagggatacttctagggggagtagaaggagtgtgaccgcagtcagagcaggagagtggattggagtaggggaagtgatgggaaagaagccgaggggaagggataagggggtggtgggtggcagctgggcctccattggcctggtgagtagttctgtcaaggatcagggacagtgacaggaggactccgagttattctgttgaagattggagacagtgttgaaaggatcatggggatgagcacatggtttggctgtcacatttatttctttttggaacttgagggttttcctgttcctgtgtgtgsagatttggggtgctgggtaaatcctgggcagtgaggaactagcagaaattggatattaatattagctacacagctgctcataccaggatggagctgatatgggacaggcagaggatgtggaatcaggacaccttkgttaagtctggccttcattccctagcttcataaccttggcaattctcttaatgtcagtgagtttcagtttcctcttctgtaaactaagggttttctaaaaaagcctgccctacctgcctaacatggttttcatgaggattaaatgagataatggatgagcgtgcttcctaatctgtaaagctttatgcaaatatttgctatcgtcatcagctgtattattgatagggtcaagataccagtggaagtgaaaacctagaacccagagtgaaggtgacactgcatttaatcagctttgtggaacaggtccttttttcttcttgactggtcctgggtcagcagggcagccactgtcctcagatgtggttcttctggaatgtataatatgggaggcgactatcagagtgatgcccattgctaaatcactgttctacaaaactggtgatagtcaggattgtttgctaaagtgaaactaaaaaggctgtaagtttgagaagcagatgagatgctggaacgtggccatgttaactccttgttaaataaacttttcatttattaatgataaccaccataccgtagcttggatagcacattaaagaaaacataatgtgttcatttcactgaattgatttatccaaagaaaaccatgttgccttcttcagatggggacattgtggcatgggttctgtgatgagaacatatctgtcttctaatttgaacsctttgggcccctcactagctttggatggttggggcaagtcatttaacccaccacgcctgtttcctcatctgtaaaatgggaatgatagtacctaccacagaactattccagggatttacgtgagttaatgtatataaattgcttagcacattgctctgcacataaataaatgctcgataaatgctagctatggttgttattacagtgacattgggcatatataakactattgttagcattgtagttaactcagaggatctctgtgtgtcaattgactcctcaggcttcctgacaatgtcacctttgaggaaggcgccctgatcgagccactttctgtggggatccatgcctgcaggagaggcggagttaccctgggacacaaggtccttgtgtgtggagctggtaagaaacagaagccaccctgttgcgggttcattgactgggaattcagggaaccctctgcccatctcattccccctccaaggcttgagatttgttctagaatccttctgggtaagggaggattgcagtgtcccattccctcagtgactagcactttgctaaacaaatgagtatctgcagacatgatattaactagggttatatgtcctaggcaacatagccctttttgttcatttaaagaatgaattggctgggcacagtggctcctgcctataatcccagcactttgggaaaccaaagccggtggatcacctgagcccaggagcttgagaccagtctgggcaacatggtgaaaccccgtctctacaaaaaaatacaaaaattagcaggtgtggtagtgtgtgtctgtagttccagctactcagaaggctgaggtgggaggatcacttgagcctgggaggtcaagggtgcagcgagccatgattgtgccactgaactccagtctgggtgacagaacaagaccctgtctcaaaaaaaacaagaccccatctcaaaacaaacaaacaaaaagaatgaatctgggccaggcggggtagctcatctcagcactttggaaggctgagacgggtagatcacttgaggccaaaagttcaagaccagcctggccaacatgatgaaacctcaactttactaaaaatacaaaaattagccaggcatggtggtgcaccccctgtagtcccagctacttggaaggctgagacaggagaatcacttgaacctgggaagcagaggttgcagtgagccaagattgtgccactgcactccagcctaggtgacagagcgagattctgtctcaaaaaaaaaaaaaaaaaaaggaattaatctggcgattatttttgaacccttgatgggaaactagggaaatttttttttttcttttgagacagagtcttactctgttgcccaggctggagtacagcagcgcgatcttggctcactgcaacctccaccttagagaaatatttttgatagtaaagggaagggcaactcttggaactttcaaattataccagcaaagtgatggcctagtcccatctatgaataaggtagaccctgctcccggccagtgggaggagtgagcagtggtctgctcccacaccactgtgagccagcaatctgcctgcagtagggctgtagctagctgccttctctcatcccctgtttcaagccatctggaacaggccctagcagcctyagamcraatcattctggtgacccagacagtacgctcacgctccttgtgggtgtgatctggtgttcctcatacttgtttgtgattttctttggctggccaaataagtgatcacayggcttcctaagaggggtgatggatgtagaatagacttgccacaatgggctagcagactgcgggactcaggtgacagattcttataaaaatctgcatggatccagtacctttttaccatagaaaaggaaaataagtcacacataccacacacatgcatgccttgcccccaacacacacacacagaaattcacctgcaatcccgtcaccgattagcccaagagaaccactgttaatatttgggtatagaatcttttagttagttagtttttttctgagaccatgctaaatacgcttcctttacctactcttttttaaaaatcaggctgggcatggtggctcatgcctgtaatcctagcactttgggaggcygaagcagtcggatcacctgaagtcaggagtttgagaccagcctggccaacatggtgaaaccccgtctctactaaaaatacaaaaattagccaggcgtggtggtgggtgcctgtaatgtccactacttaggaggctgaggtgagagaattgcttgaacccgggaggcrgaggttgcagtgagctgattgcaccactgcactccagcctgggtgacagagcgagactctgtctcaaaaaaaatactgtgaacatttttccatgtcaatagataaagagttatrgcgtaatttttagtagccatgtagtttttaaatcatgctttgttggacatttcaggtattatttttcagtattttgttttctgagggagctcacaaaattgttctcggggttgtgtacaaaaagtaaacccccaaagatagtctgcattgctttcattccgtgggtctgatttttatattaaaaccatagtgtcacatagcatgcagataccatggggaagcaggtgtctcaggcaaatccttggatacctgagtatcctggggctatctgggcaccagggccaacccagggagccagctcacttaagaaccctctccaggtggtcctcagagggcacctaaaaggaatatgtctctctctgggggaggtgtgatgggttctcacraaggtaggggcaaagaaagaccaggaaaacaagtccagaccttctgagatttcttattttctgaataagtttgtgtttccttgaatcctgtggttctttgasattatctccactagtgcccaggagtaagtrggaaaattttagctctgaggtttgagaggattaaatagaacccagcactaggagcgtattttatgtagagaataattcttcatggatttattcacttctgcattcaacaaacagccgctaaggtcttatcatgccaggcactgggatagatgctagagacacacaaaagatrtggttcctatccatggcctggacaagtgggagagcagatgtttaatatttcacgaacatattccatcttctgctttgtttagggccaatcgggatggtcactttgctcgtggccaaagcaatgggagcagctcaagtagtggtgactggtaagactttgttctttatcaatctccttgactgggaaacagckggtcctactgtatgtgcatgtgtgaggagaggttatcygtgacagtgtggagggggtgagtgtgtagtgtcatatggattgtggaratatagargagtktgagtgtgtgttttgtgttaggagaagctatcagagagagagagagtttgtgtgagagagtgtgtgtgtgtgtgtstgtgtgtagctgtatggtggatatgggggtatatgagggtgtagagcaggggtgtccaatcttttggcttccttgggccacattggaagaatggtcttgggccccacataaaataccctaacactaatgatagctgatgaactttacaaaactgttttttaatttcataatatttttagagagtttacagatttgtgttgggccatattcaaagccatcctgggctgcatgtgggctgcaggttggacaagcttggtgtgaagagtatgtgtgttgggctcaacaccaccacccattgcacgagagctttgttgccatcrgatcttacayctccattttcttttcttyctaatgagtcatcagatttctcttgtttgaaagaattttttttttttttttttttaccttcagatctgtctgctacccgattgtccaaagccaaggagattggggctgatttagtcctccagatctccaaggagagccctcaggaaatcgccaggaaagtagaaggtcwgctggggtgcaagccggaagtcaccatcgagtgcacgggggcagaggcctccatccaggcgggcatctacgtgagtgggctgagggcagctttggggaatcagcataggggagtgaaggaggcagaagtagggagtcaaacttctttaccagcttgctgcgtgagccccaagccaaacttattcatcttttgccatctatgttttctttttcttttttttttttttttttttttttttttttgagacagagtctcactcagtcgcccaggctggagtgccgtggctcgatctcagctaactgcaagctccgcctcctgggttcacgccattttcctgcctcagcgtcccgagtagctgggactacgggcgcctgccaccatgcccagctaagttttttgtattttttttagaagagatggggtttcaccgtgttagccaggatggtcgccatctcctgacctcatgatccgccctcctcggcctctcaaagtgctgggattacaggcgctatctctgttttcttatctctagtgcggagactgtacttgaacttgccttacatccttattgggccatctgaggttcacacaagataacagctatacacgggccttgaaaaatgttaaggacacacactttggggatggggttggcttcatgatcatatttgttaaaagtgcagtagttttggtaaaaagaccaagaagaaaaacagggaaccatgccttaattgtatgtgggaaatccccgtcttattttattgaggaaaactgcagtctttagtcacttatataaaataacagtcatttagttagtcatgaaggtgaggtgattttccagggtcacagctgactactgcttgttttgtctcccagacctaggaacagataagctgccagtgcccgactcgcccctcagcgacccaccagccacttatgggaagttggcaggaagttggaggtggtgggagggagtgtcattgacagatcaaagtatgaggaaacgaagggaaaataacaacttccaggttccaagccctactgtaygccaggttctctgctgtactttataaacatgaggcctaatctgcacaayagccctgaaaaccagttaccrttttatgctgagggatttgtggtttgtttgaggcaagccaagtcaggcccaggcccagccctgccaggccccagtgcctgagttgccccgctgcttaggagaggaagggaaggagggcacgaacaaccatgctagggtggggggacagggccagggctggagagggtagcaggcagccgccaccacaggggwctcctgtccctgcctcccagacagcctccccaggtagcgtgggcttcctccttccttctgaggctcacagcaggagggcactttgcatcacatgagacattctagggaaggctgacccaccaagctgagtagcagagctgcctagacctcctcctactaagttgcccagyggccttgggagctgaggaagcagtgggggagagggaggagcgggtgccaccttggcagtgtcgtgagtttcagctggagtcsgccagccctctgcttcactgtcataggcagtggtcgccatgtgggaaggggcaaaaagaagccgaagctcagagaggaacaatggatctgtgtgtgattgatctacccatggtatgtcttgggyacctaccatgtgccaggctttgtgctgggcactttgagggctaagacatgagtaggttgcatctgctgtcttcaagttgtcagcaggtaagtgacctccacccygcagagaggcagtataagctgggggacttaaaggacatggctctccttcctcttgtgccctgcccttagagcatttggaacagttggcatttccactgttgayggtgggggcctggttgccaggctacctgaggcaggcatggagktgaatgtgacccatgggcctcaccaggcctgaagcagtgtctctcctgacgtcacgcatgacgggtgctgtagaatgctataggccaccccgccaatgagcaggctaggtggctggaccaaatatggacaaatctgagcatcgccrtcctgccaggttatgactggatagtgtttgtgatgagacrtggcagatgccttggggtagaattgatgtcatatccttgrtgcagatgccatacctacaggatagtgtccaggtggttccagcattccttgacctkgggtcagcaaactgctggcatcttggyagcttggaatggccagttggtgttcctcctcaccaccaggtagagaggaagtgctgatraggaagtagtttccctagaaaatgggctgagagggcacgtccagggtgccacagctctgaagcagcagcgctgggagtcactcccacaccactcaaaccctgagttcacctcttgctcacggcaccacaggcctstctccatggtgtatccatctcagaagtggaggctrtgatcgtggtgtatccttcrtctcagaamtggaggctgtgacatgtgcctttctctagttccactgtttagcaccyagaatggtcccaataaatgcttgctgctgactataatgaacaaycagcatgattgaattatccattsttctgtctctcaccgcactgagcacagtgatccccagaaagctctggaacaagcacagcactcacagggagttctggggaaattttcaggagaaatttcactgctgcctgtgacccactccaagtggggaactgayaaggcagataaacattcaaggaagacaaaacccattatggctcatactgttgaggtaaacatctctggaacaaaaagatttctaactgccagcctgcayrcatgtatgaagccttttttaagccacagaatacaagtggcccatctgtctcatgtttatagttttctcaccaccggtgagcttagagggccagtggttccttccagctctgatgaaagtgctgcctgtggaggggcgctctgggggaggaacaggtgcttagactgtggaggtggctgaagccaatattgggtcccgaatctgtaaagctttggaagatgttcccactgtgcctggttctccatgggttaagtgtatkttttcasaatacactttaaagaaaaccgtgtttactctcccgctcagttaagtttggttggcaggttgagcagttcagcagtgtacacaaatcacattctcaggaatttttggatgctcagctgatgcaaccagaagatacttgtgtgatgacaatatgttattgtaagtgggaagtcagtatttcttatcttctgagctttcttgtttttacctcctttacaggccactcgctctggtgggamcctcgtgcttgtggggctgggctctgagatgaccaccgtacccctactgcatgcagccatccgggaggtggatatcaagggcgtgtttcgatactgcaacacgtgagtatgcygtgggtgagccgggatgcccagcctccagcaagaccatggcaggccccactcagcctctggcccatgagtctctgcctgtttgttcatggggggcactccctggccacactgatagctgtgtgatataacagggatccaaagagagaacactcactgccagttaaagaatgggaggaacagaaggatggatggagggagggaaggaggggattttgaagcatagtcttactgagtgtctgctgcttatcccccccaggccccttttttcccccwattttcttaagttgccaggtctccattttctccmtttaaagggaagaaggagagaaaggaggacaaaaggaagaaatcaagtcctgtggcttccgttccttagccctagggcccaccctggggagcgaaagggtcttagtttgscccacccatgttctgcagctccaccctctcccctgctggggccctctggctgggacccctctccccagcagtgtcccttactcctggctttagaggctgtaactccmtgccctcatcagggcgccagttttccagtaagctgagctgttagtgggtgtgactggattgtcccgggctgcctccccacggcttctctgccttttcccagtggcctccaccatgtgcctygtaccttcatgccacaggaattctaggctccatggcagacgtggcagagtgagcgggtgggtgaggggtgggggcaattgsaaataggctctgtacccctgaatcataagccataaggtcctttcctgggttgttggcctgtaaaattggctttgcagaaccacagtgctatcaataaatacggccaagctgatctagtgcttggtagtttggggcacctggctctttcctcttgaaggttgaatataatgctcgtgctcttttacaggtggccagtggcgatttcgatgcttgcgtccaagtctgtgaatgtaaaacccctcgtcacccataggtttcctctggagaaagctctggaggcctttgaaacatttaaaaagggattggggttgaaaatcatgctcaagtgtgaccccagtgaccagaatcyctgatgttaatgggctctgccctcatccccacagtctygggatctcagggcacaayggmtggacabgrgtgggctctgatgcagaactttctcttttgaatgttaagaataactaatacaattcattgtgaacagaagtccttamgcagaggaattggtgtgccttaaagatacaatctgsgatagtttgggggaacttgtagccagaatgccctgttcatgctgagcaaagttcagcaagtagagcagagtttggcaggcaggtgccaggaactccccttcttcctggagtgccttcattgaggaaggaaatctggcccttgggtttcctggttccactgctactgacccrgaggggaatgagggctgagttatgaaaagataacttcatgaagacttaactggcccagaagctgattttcatgaaaatctgccactcagsgtctgggatgaaggcttgtcagcacttccagtttagaacgcaatgtttctagagacatattggctgtttgttttgatgataaaaggagaataagaaaaggcatcactttcctggatcmaggataattttwaaaccaatcaaatgaaaaaaacaaacaaacaaaaaaggaaatgtcatgtgaggttaaaccagtttgcattcccctaatgtggaaaaagtaagaggactactcagcactgtttgaagattgcctcttctacagcttctgagaattgtgttatttcacttgccaagtgaaggaccccctccccaacatgccccascccayccctaagyayggtcccttgtcaccaggcaaccaggaaactgctacttgtggacctcaccagagaccaggagggtttggttagctcacaggacttcccccaccccagaagattagcatsccatactagrctcatactcaactcaactaggctcatactcaaytgatgrttattagacaattccatttctttctggttattataaacagaaaatctttcctcttctcattrccagtaaaggctcttggtatctttctgttggaatgatttctatgaacttgtcttattttaatggtgggttttttttctggtaagatttrgacctaaatcgcatcaygccaacttgtgactttgagactattcatcaagaatgaggatatagtagccatgacatagcttgagctatagcctttaattccttactttggctatgggtggagggtgagtttgaaraggttctgattttcttgtaacctgggaaarccatgaccttgtgcccgattctttcagwttgctttgggtaataaatattggtggtggtatctgactcatgctgctgtttatggtcctgtttagtggggaatggactcaggttacccatttcccagagggaaggatcccaggatttttgaaggttacatattttctgtaccaaatataatttcattgacatgaattatctctaatcctcatgacaagccacatacacaatcattttgtagataaagaagatataaatgccagaggagaccttaagattgtcttacaacacaacccttcagttaacgagagaggaaattgaggctcagattggggaagtgacttggcaaatcacacagtgggttagtcaatggcccaggattagacagaacccaggaatcctgacatcaaatcctttacaacatgctgcctctcataggcctgaggtgtccagtcctagaggacaaatgatgctccccatgccaccacccccaccaagcagctcctactgatgagaagatgcactaagcagtcttggtggaaacatcatcctcacgccctgtgccccctttcaggtgcccagagaaggagctcagtgtctgcttcagccagggctttaagagagaaggaagctgggagtgaggggcagaggctctaccagagaatgtctgctggtgtcttggagscacttcctgcagcctatgcatgcctcgtgaagccatttcactgctgccccttcatcctcctcctccctgagccctaggtagaagtcagtgtgtggaggaggccacccagagatgaccctgaccaggccccaccgcctgtagccagacccagcctctgtcccagctggctsctaatttctgagcattkcttccctgttakttggcctcwgtaccttgaacctaggttgacatcatgagcagaggacagttcttaggaaaggcaaatatcccataaatcctatttgcctctctttctcctaacctctggctccaccaactccccaacaggcctcctgcacacacaataggagtcaggagggaggaggcaggactgtgctacacaagggagactgggtggggaagatgtcagagaaccagtgactgagtgcagaggtgacttcacaccagcatctgctgtagccagaggtgggctgcaagagggaattagaggagccaacatgtcctctttctcctttagggtccatggagcagtccgctgcttccaggttgcctgtggggtccttcccagctctccgccctgacacgtcttcactccctagcactcgtggagctgactgggtggggacctcagtgttgactgaaagcgtgaatcaagtgccaggcactggtgacagagcacacagaggctgctgggcctcccaaggtcggggagcttgtggggaattcacattcttggttccgggactgattcactgagtsaatcaatattgattgagcacttagttggttgtggtggtggtaggaatgaattcctgggcttcctgcagcccctttccatgaatctatacatatcaaacatgtgcatgcatttgtaaacattaatgggagtgtactttacttttttcattttactcataaacagacgaggactttaaaaaaatcacaattattaaataattcccattactatacctgacaaaactaataataatttcataatagctaataccccgtcaatccatgccatattttccctcatctaaaaaacagaaaaaattacttttttttcccccaaagacagggtcttgatcagagctcactgcaatatcaaactcctgggttcaagtgatcctcctgtctcagcctctggagtagctgggattataggcatgcaccaccatgcctggctactttttgtagagaaaaaaatttaaaaaggtctcactatgtggcccagagtgttcttgaattcctggcctcaagcaatcttcctgcctcagtttcccaaagcactgagattacaggcatgagccaccatgcccagccaaaactttacttttttacacttgcttttctggaatcaggatctaaacatattgcatgcggttgatatattaagcctgttttattttttattttttcttctttcttaagcctctttattatagttccccctacattttggttcacatgccactgttatgttgaagaaactgggtcctttgtcttctggataccgttttacaaacatacttgttttcatttaataaatggctaaatttctttctatgtcaataattatacacatcattattttaaatcaccacatcccattgtgtggatagactatcatttataaagcaaattgcagtattttgagtgtttggatagtttacagagttttgctctaataataaagttgcaatgacaacccttgttgcatatttttgttctcctgactcattatttcctgaagttattaatatgttatttcctgaagttattaatatgttatttcttgaagttatattttagaatgaaaatagctggggttaagggtacacacatttttaaggtgacctggttagacaagaaaacacagtattgacattcagactgtctaagaaaatctctgggggtgccccaggctttgtgtgatgtgggaagactctggggtcttgggtagctcacaggggctgttgaggatgaggccatgaagccactggctctctggcttcaggccacccttgggaaagcaggggcctagacccataaacttggacagattgccattttccaggccccagtttccttatcagtaaaattggttgtcccttttagctctgggactactgccaggacatgacaacaaacagctcctgtaaaggactggcacagaattcacagggaactgtggcccagctactgtggagcagtgagccgccatcaatgaacttatactggaagccttccctacccctgtccctccacctcaattccaggggacactgggtaccgttcaccaaactttttttttctcctccaggtttatcttacaaccaaatccaagcagaggctgccccaccccaacaccccattttacacaaggggggaatgccaacagaattcagcagcctgactcgctcacccctcaccacttccattgctcagggcattgtggggagggaaaaatcccacctcagcccaatacacttccagagttccctactacaggcattctgcaatagttacaccagacctgagctcactgacatggttgggatggaagaggctgggcaaatggcagcttcagctaaccttgaggctgccatgttcactcttccccactggtcctcaggaaggtgagaatccctgatcccctgtggcacacagcagagggcccaggaggaagaagccagagggaggcaaaacagagagcccrggaagcttgcccacctacagagagcaaaatgccctatccattcccactgccacagcaacagatgggtgactcggaagttggggagcctccgtgatggcttcagggatcttcccagaaagtacagaacacatgttgctgtctttctcctggctaggcccacccaagttagtgaatatccaggagccccttccccttgtgcctgacctggcgatttcaggaaactaaagtctgggactcctgatctatcttttggcccagtaacaatgttattcaggacaaaaatatttctgcttgtaataacctagaattagtgtttcttatgatatacaaagatggggcatattgctgttgaacactatcagcaatgaaacagcaaaagaaacaatgggggagagggaggagcataagaccattgagatctgtttcactgagaagttcagggcaggagcccctgcaactctaaagaaaggccattcaccaaagttttttttttttttttttttggagacaggatctcattctgtcgcccaggctggagtgcagtggcgtgatctcagctcactgcaacctccacatcccagatccaagagattctcctgtctcagcctcctgagtagctgggattacaggcacacaccaccacgcctggctaattttttgtattttagtagagaccgtgtttcactatgttgccctggctggtctcttgagctcagacaatctactcgcctcggcctcccaaagtgctagaattacaggcaagagccaccacatccggcccattcaccaaactttaacaaatcaccaggaagaagtaagggtggtatgtgtagaatgttccttattggttctgacctctccaagtaggtgcaaatccatgtggcataaaatgacttggattgggtactggcttagtccattttgtgttactataacagaatacttgggactgagtgatttacaaataaaggggtttatttagctcacagttttgcaggccgggaagtttaagggcatggcactgccttctggtaagggcttttgtgctacaccataacattgcagagaaagtcaaaggggaagcagacatgtgtgaagaggccaaactcaagggacgtcctggcttggtaacaacccactcttgtggatctaatccgttcctgagagaatccagtcttgctagagtgagaactcactaccgcgaaaatggcaccaagccattcgggaggaatctgtccttatgacccaaacacctcccattagccatctgctcccaacactgccacattggggatcaaatttcaacatgagttttggtggggacaaactcaaaccatagcaggtgttaatatgcagatcttagatgctcagaccccaagagacttggcaatttgtagaacccttaaggaactttgccttctgagtgatttgaaagcatttgtcacattgctgtttcattctgtgggcacatatgtgtatgtaacgctgtgcttatatagcttaacaatactgtgtagattttcgagtgctcttgcatatttgtgctatctgttttcaggaataccaaagggaatcatatctcttgccactcatcatgtgagatgggatagggctgccagcgctgacagtattaaggtctaatgattctcaggaacttctggaaaaactgttatcagtaagcagaaggagtccaacacatgatctgtgagaaggtgaatgcggaaaaagctgggaggcaaggaactagtcatccagggcagactgaagaaagtgactcagctctggcctttggggactggggctgctggttctggggagcagctgggctttcagcacagcacagggacagacaggctctagccagagctctcctgggccaaccccaacttgccttcccctgcaccacacactaaatccccacaccctgctgaacacccaacaaaactaggacctgaggaaggcccttgctcctgccatgctgccttcttccggaatggggttccagagggaatgatgcttctgaagggaaracagacattgccaaggtggttggctggggaagtttctgtcatccagtctgtatctggccatgggcctgtggctgactggagggacagctctcctgcatttggaagaggcactggaagaggcatttggaagaggcactgggttgtgtagatgtcttgggctccctatagtaagaaagaggtgggtacacgttaggctactctgcttcctgatgacctcgagcaactcacttgactccttcaagcttcaggttcctcatcctttaagtcggaaaaataaaacaagcctcaggcttgtcatagggacagaataaagaagcctgatgctcttcccctggtgaatggcactctgattatgtttattaagtgcttgtacccctgcccttgtctcaccaaattttctctcttgacctgttaaatgagtaggatgaatgaccctcaagacttttccagctctgagccctgagtctgcaaaggtgcttgaaggtacgtgaagagttcccagggtggcagaaaaggcctcagcctggccttgacccagcattctcagcaattccacaaacctgccagggaaagagagttggcagcagacctggaggccaggcagggaggaggagaggaaccaggtgtca

SEQ ID NO: 94497 - DNA, 24918 bp, Homo sapiens
accgcgcccggcctttttttgtatttttagtagagatggggtttagccatgtaggccaggctggtctcgaactcctgacctcaaataatccgcctgccttggcctcccaaagtgctgggattacaggtgtgagccacctcacctggcctaatttttgtttttgtttttttttttttgagacggagtttcgctcttgttgcccaggctggagtgcaatggcgcgatcttggctcaccgcaacctctgtctcccgggttcaagcaattctcttgcctcagctccaagtagctgggattacaggcatgcaccaccaccccggctaattttgtatttttagtagagacggggtttctccatgttagccaggatggtctcgatctcctgaccttgtgatccgcccgcctcttcctcccaaagtgctgggattacaggtgtgagccactgcgcccggctttatattcttattttttgtgatcttggctcactgcagcctcgaactcctggcctcggtgattctccaatgtcagcctcctgagtagctggaactaccggcatgagccaccatgctcggctaatttttgtattttttgtagagacggagtttcaccatggctgacctcaaactcctgggctcacacaatcatcttgcctcagcctcccaaagtgctgggattgcaggcataaaccactgtgctcagccttttttcttcctttttttttttttgagacagattctcactctgtcacctaggttggattgtggtggtgtgatacagccgtgactcaggctcaagagatcctccagcctcagcctcctaaagtgctgggattataggcatgagccactgtgcttgcctatctggttcttttttttttcttttgagacggagtctcactctgtcacacaggctggagtgcagtggcgtgatctcggctcactgcaacctctgcctcccaggttcaagcaattctcctgcttcagcctcccaagtagctgggactacaggtgcgtgccaccacgcccggctaattttttgtatttttagtagaggcggagtttcacagcgttagccaggatggtctcaatctcctgacctcgtgatccactcgcctttcctcccaaagtgctaggattacaggtttgagccacggtgcccggccgcatttttgagatgaagtcttgctctgttgccaggctggagtgcagaggcgtgattgttgctcactgccacctctgcctcccgggttcaagtgattctcctgcctcagcttctcaagtagctgggactacaagtgtgcaccaccatacccggctaatttttgtattttcagtagtgacagggtttcactatgttggccaggctgatcttgaactcctgatcttgtgatccaccctcgtcagcctccaaaagtgctgggactacaggcttgagccaccgtcccagcctccatcttggttttaagtggaagttcctaacaccaagcaatatgggcatggtggctctgggatgaaacctcagcaattagggaggcagaggtaggaggattgcttaaacccaggagttccagaccagttggcaacaaagtaagacccttatctttttttttttgagacagatggagtttcgccctgtggcctaggctggagtgcagtggtgtgatttaggctcactgaaacctccacctcctgggttcaagccattctcctgcctcagcctccctagtaactgggactacagacgcgcgccaccatgcccagctaatttttgtattttagtagagacggggtttcaccatgttggccagcatggtctggatctcttgacctggtgatctgccctcttcagcatcccaaattgctgggattataggcgtgaaccaccgcgcctgtcctgttttgttttatagagatgtgtgtcacactatgttgcccaggctggtcttgaactcctgtgctcaagcaatcctttcaccttggccttcctacatgttgtgattataggtgtgagcctctgtgccctgccttattgagagctattggacatggctgtaaaacagagagaatcaatgaggatttcacattgaaaaacctgcctgccacaattgggcaatgtattgaaggggctggagtgaaagtggctgtttaccagcaagctaagaggtgaaactcatctgtaatgaggggccatacagttctgtgtctgctggtggctgtgctcacagagatgggacctaaagccagagcttgtctggatcctcctgatgcccagggggtccatactgtaatccatgggatttgggaagggctctgcttcagcacgggcaggcttcctataggggaatatctcaggaacatggagggagctacacagtgaatcattagcctgggtcaaaatggagatggcaatgatcagaccagtccaacattagaaattgtcttcccctgacaacacccaaggaggaggcagggaatgttttctgttacttaaggtcaccaggcctggagtgggaaggcacagctcctctaggccattccttgggatggcctggaatcatgtgcctgggcttgtttgacctcacatcatgagagccccataggctgtgcaggatctgtgtctctggggcccctcaatatagagtagacacaggttaactgaagctgaccattgcctggggggttctgacctgtgagatgggagccaaagggaggccagggttccagctttactccacgctgttttcctgggttggggaaatcactggacatcttctgtctgagctttgccatctataaaacaggcttggctgggcgtggtggctcatgtctgtaatcccagcactttgggaggccgaggcaggcggatcacaaggtcaggagttcgagaccagcctgagcaacatggagaaaccctgtctctactaaaaatacaaaaattagctgggcgtggtggcacacgcctgtaatcccagctactcaggaggttgaggcaggagaatctcttgaacccgggaagcggaggttgcagtgagctgagatcgtgccaccgcactccagcctgggtgacagagcaagactccgtctcaaaaaataaataaataaataaataaataaataaaacaggcttaactgaaaatctcttggacattttttccacaagtatttggaagaatggtgatgataaatatgatggttaaattgtgtgtgtggtttttgcttctgttttgtttttgagacagggtctcactctgtcacccaggttggagtgtagtgatgcaatttcaaggctcactgcagccttgacctcccagtactcaagtgatcttcccacctcagcctcccaaatagctgggactacacaggcacacacccccacgcccggttaatttttgtattttttgtagagatatactttcaccatgttgcccaggctggtctcgaactcctgagctcaagctatccacctgcctcagcctcccaaagtgctaggattacagacatgagccaccgtgcccggtcaatatttacttttttgctttactttttcgttttttccccccacaaccactccctcccccatccccttctcgctgttttttttttttttgagacggagtcgcccaggctggagtgcagtggtgtgacctcggctcactgcaacctctgcctcccaggttcgagtgattctcctgcctcagcctcccaagtagctgggactacaggttcgtgccaccacgcctggctaattttttgtatttttagtagagatggagtttcaccgtgttagccaggctgttctcgatctcctgacctcaggatctgcctgccttggcctcccaaagtgctgggattacaggcgtgagccgctgcgctcggccccttctcactcttaagatcatgtttattgaggtataatttagatacaataaaatgaacaaatcataagtattcagtttatttgtttgtttttttagagacaaagtctcactttgttacccaggctggtctcaaactcctaagctcaagtgatcctctcaccttcatctcccagggtgatgggattacaggcctgagccaccctgcctggcctatgcatttctttatattgatgagtagtattccattgtattgatatagcacaattggtttatctgttcatctgttggacatttggattattttcaaattttggttatcatgaataaaggactttggttttgttatgctttcatttaccttgggtaaatacttatgagtgcaatggctagatcatattgtagatataaattaagaaagaccctgtttttcaaagtggttggaggccaggtgtgggaggcaggaggattattgggacccaggagtttgagaccagcttgggcaacacagggaaaaataaacaaaactaggccaggcacggtggctcaggcctgtaatcctagcactttggaaggccgaggtgggcagactgcctgagctcaggagttcgagaccagcctgggcaacaggatgaaacaccatctcgacttaaaatacaaaaaattagcagggtgtggcggcatgcacctgtagccccaggtacttaggaggatgaggcaggagaatcccttgaacccggggactcaggaggcggaggttgcagtgagctgcgattgcactgcactccagcctgggcaaaaagagcaaaactctgtcttaaagattaaaaaaataaaaaggccgggcgcggtgcctcatgcctgtaatcccaccactttgggaagccaaggcgggcagattacctgagttcaagaccagcatgaccaacatgatgaaaccccgtttctactaaaaatacaaaaaattagccgggcacggtggctcacgtctgtaatcctggcactttgggaggccaaggcggatagattgcaaggtcaggagttcgagaccagcctgaccaatatggtgaaactccgtctctactaaaaacaaaaaaattagccaggcgttggtggcgcatgcctgtaatctcagctactcgggaggctgaggcagaagaattgcttgaatccgggaggcggaggttgcagtgagccaagttgcgccactgcactccagcctgggtgacagagactccgtctcaaaaaaaaaaaaaaaaaaaaggaaaaaaagaaaaaaaaattagctgggcgtggtggcgggcgcctgtaatcccagctactagggaggctgaggcaggagaatcgcttgaacctaggaggcagaggttgcagtgagccgagattgcgccactgcactccaacctgggcgcgactgagcgagactccgtctcaaaaaaataaaataaaataaaaataagaaataaaatagacaaatctagcaggacgcagtggcgtgtgcgtgtagtcccagctactctggaggctgaggtgagatcactggagcccgcgaagtcgaggctgcagtgaaccgtgatcgcagcattgcactctagcctgggtaactgagaccctgtctctaaaacaaacagaaaaccccaaagtggttggaaatcagcaatggatgagggttccaagcactccacatctttgtcagtctttaattttagcctgtctaatgactgtgtggaggttctaatttgtatttcctctataaatattaagtatcttttcatgggtttattggctgtttatctacttttgcaaagcgcgtgttcaaatcctttttttttccaacggctaatacgtatttttgaggttaatctaggctaatcactgctgatttgtgtttatgtatttatatgcctttaacagactaccgccctaagcagtgaaagaaacccaaagggagccgaatggcttgcatacagaaaggctgggcagttgctgggcgcggctcgcgggtaggctctaagcctcgagcagtgattggctgaagaagaacttcagtgggaggggcgcggtgacccacgcctgtaattccgacactttcggaggccgaggcgggcggatcacttgaggtcaggggttcgagaccagcctggacaatatggtgaaacctcgtctctaccaaaaattaaaaaaaaaaaattagcagggcatggtggcgggcacctgtaatcccagctactagggaggctgaggcaggagaatcgcttgaatcccggagacggaggttgcagtgagtcgagataacgccactgcactctagctggggcgacagagcgagattccgygttaaaaacgaaaaagaaaaaaacttccgcaggcacttccgactcccggccgatcctgagcttcggtgattggctgggctggccgtacgcggggcctcccgggatttgtagttcttgaggctcggctgaggatgccgggaagggctggtggtcgggggcctagagcggcggttgcacttagttgcggctgctgtcaccatgtcccgcgttttggtgccttgccatgtgaaaggctccgtagccctccaggtgggcgacgtgcggacctcccaaggccggcctggcgtgctggtcatcgatgtcaccttccccagcgtcgctcccttcgaggtgagcaagcctggtgggcgcgaccgaggctcccgggcggggccgacctggaatctcggtcgtttcccaggcatttaatcttttatgggaaagcctctgccgtcttccttgcccttgcaaattagttaatcattcatttatttagtccttcagttaacacatttttcctagaattgagcttcctgtcttgttctctgctatgtctcttgcccacatccaggacagcgctggcatgcaggtggcgagagtgggctaggttttgctggaaataccaaatagtgaaccaaaatagaagttaggggtcattttgtccctggccacagttggggatcgctaagcaatgatttaccccaaaacctgcctccccatttttttttttttttttttgagacggagttcactcttgttgcccaggctggagtgcaatggcacgatctcggctcaccgcaacctctgcctcccgggttcaagcgcttctcctgcctcagcctcccaagtagctgggattacaggcatgcaccaccatgcccagctaattttgtatttttagtagagacagggtttctccatattggtcaggctggtctggaactcccgacctcaggtgatccgcctacctcgtcctcccaaagtgctgggattacaggcttgagccaccgcacccggccacccctccccattcttatagtccctcccagaggtcacttacctcatcaccatacccccaatgactcgagttgccaatctccagttgcacttccacatcagttgatagagtgactggacactgtatgactcaacaaagagggcaaaacccacctccaatggcgtggcattgagagccctctgtgtctgtgccccacctgtttctgtctctttttttttttgagatggaggttcactcttgttgcccaggctggagtgcagtggcgcgatctcggctcactgcaacctccgcctcctgggttcaggcaattatcctgcctcagcctcccaagtagctgggattacaggcacccaccatcacgcccggctaaatttttgtatttttagtagaaacggggtttcaccatgtgggacaggctggtctcgaacttgtgacgtcaggtgatccacccacggcatgagccaccgtgcccagccctgtctctcttgtctcaggagctttgtgctgtggtgtgtggttctcccccaagctgttccttaccatcaaatgggaaacttaattaaagagcccaaccttggaaatcctgacttagtagactaaggtgaagccaggacaatttatttggtaacacattttcttgggtaattctgatgagtatccaatgacaagatccactgcagtagtcaagctgaatcactggctgttccagtggcacaccaggttctctcgccctttggtaattatttgtatatgctacttttacattatctacatttcttttttttttttttttttctgagaggtagcctcgttttgtcacccaggctggagtacagtggcttgatcttggctcactgcaacctccacctcctgggttcaagcaattctcctgcctcagcctcccgagtagctgggattacaggcatgcgccaccacgctcagctaatatttttgtatttttagtagagattgggtttcactatgttggtcaggctggtctcgaactcctgaacttaaatgatccacccgccccagcctcccaaagtgctggcattacagacagatgtaagccactgcacccagcctacgttttctacatctctttttttttttttttgagaccgtgtcttgctctgtcgcgcccaggctggagtggaatggcgcgatctcagctcactgcaagctccgcctcctgggttcacgccattctcctgcctcagcctcccgagtagctgggactacaggtgcccgccaccaagcccggctaattttttgtatttttagtagagacggggtttcactgtgttagccaggatggtctcaatctcctgaccttgtgatccgcccgcctcggcctccgaaagtgctgggattacaggcttgagccaccgtgcccggccacgttttctacatttcttagtccacttggtgaactcttcctccttcaggcctcatatgtacattttctgcctcttccagggttagagcgctgctctctagcagcatcttggacgtgtggcaagatctgcagtcgtggtttgtttccaggacctactcatttagactgtgagcacctttaggaaggcagaattgtctttgggccctagtgatacttgttgaaattgttagtttagtagaagagtacattgaaaggggaagaggcaggtggatcacctaaggtcaggaatttgagagcatcctggccaacatggtgaaattctgtctctactaaaagtacaaaacaattagctgggcgtggtggcacgtacctgtagtcccggctactagggaggctgaggcaggagaatcgcttgaacctgggaggtggaggttgcagtgagctgagatcacgctactgcactccagcctgggcaaaagagcaagatttcctctcaaaaaaaaaaaaaaaagaaaaggtggggagaaggaagaggtggcacctttgayctttgagcttttcaggcccctgggcctgggtctgacttgttgtaatgggttgtatgtgttctagttgcaggaaatcacgtttaagaattactacacagcttttttgagcatccgtgtccgtcagtacacctcagcacacacacctgccaagtgggtgacctgcctgcgggactactgcctaatgcctgacccacacagtgaggagggagcccaggagtatgtatcgctgttcaagcatcaggtcagctgggcctcaggatggccagggcagcccagatgaggacttaccagaggtggggggattggatcaatataccaagagggaagagggggccagtctggcctgaactgtgacttccagggaagtgccttggagggactactgttccttccttcccaaggcctgtrgggtgggcagcattctggctcattgctggttgggaggcttctgggcagtgagctggatccttgctgggtycttgtgtgtgtgtgtcagatgctgtgtgacatggctagaatatcggagctacgcctgattctgcggcagccatcaccactgtggctgtctttcacagtggaggagctgcagatctatcagcagggaccaaaggtaagtgactagctcagctgctggctggycctttccccagaaagcttctatgactgggaaagctaggtggtggggtgggtaatgggtgaagattgtraatggggccttcatggaggttagctgggtgtgaatgctggaagctcacaatgagaggtgaggccatgtccccatatcccctgacctttggggccacctgctactttcagagctggagcctttaggtgctgggagacacttttgagcttgtgtttctgaggactccgtctgcacagcaggagaacttaggtagtctgactgcctctttaggtctctgtgggctccctaaacagggttttcccagtgtctgaggcccagcggcccttctctctgctcctaggaccttggaatctggtcccagagctgtccactttgtctcactcagggcagtacatctttgctttgcagagcccctccgtgacctttcccaagtggctctcccacccagtgccctgtgagcaacctgcactcctccgtgaggtaagccctcaccctaggtaagaaccatgtgtgaatggctctagtgtccaacacaggccaggtagaccccttcctgtaaaattctggggctgggcccagggcccttgggtgttatcttcctcctgggtattctgtgggatttgaggcatctctgttgtggggctacatcaggccctaacctcatgtttcataagccatctgagaatgttgttggtctcagctggagggcccctagcccaggttggcctctctggagcctgaagggcactgctggggagagacccatggccactgacccctccttctggagcagggtctcccagaccccagcagggtatcctccgaggtgcagcagatgtgggcactgacagagatgatccgggccagtcrcacctccgcaaggatcggccgctttgatgtaagtaatcgcttccttctgcttggcttgctttgccctgagcagatcagacctgatggtcttttgtatttcaggtggatggctgttatgacctgaacttgctctcctacacttgaatggttgctcctagccaagatgttggcctttctgtgcccacccagacttggtttgggccaccagaggctgaagtgtatttcctgtgcattccaagtgttgcctgcatgcctgttctgtctgggccacattcacagattcaggattctcaggggcttaccgtgttacttcagcatgagctcctggcatgggggtgctctgtcttcgcctggctgcaactcaattcttccttctacccaaaaacactccagtcagttgtacttactgagaatccctgagtgccctctgccccttctggcaacatgcacattcctgtcttctgcctgctccctcatgtcagtgcagttgggctgggctgacctactaaaacctgctccatgtatggacctggaaggccattgctgccatggcacttgggacacttgaggaagaaacagaaaccttatttcttcctgtgtgtcccctagtggttttctttccatttgtgttatgccacagagagaaatttcctgtctgaactcttctgctgcctgcctaggaaggaaacctgaagatttgggcagcctgagtctcttggtttctgagctggctcctgaatatatgttcaagtgggtgtgcccatagggcctgggcacgtgtctctagcaaaaccagggcctgagcataagaactgggacccttctaggcagggtgcagtggctcacgcctgtaatcccagcactttgggaggcccaggcaggcggatcacctgaggtcaggagttcaagaccagcctgaccaacctggagaaaccccgtctctactaaaaatacaaaaaattagctgggcgtggtggtaggcacctgtaatcccagctacttgggaggctgaggcaggagaatctcttgaacccgggaagtggaggttgcggacctgagatcatgccattgcactccagcctgggcaagaagagcgaaactccatcttaaacaaacaaacaaaaaaaaaagaactgggacccttctgccatctgacatagcccaaagcacatctctatcctttctcccagttgcccctctccttttttgttgttttttttgaggttgagttttgctcttgttgcccaggctggagtgcaatagtgcaatcttggctaactgcaacctccgcctcccaggttcaagcaattctcctgcctcagtctcccgagtagctgggattacagtcatgcatcaccatgcctggctaattttgtatttgtagtagagatggggtttctccatgttggtcaggctggtctcaaacacctgacctcaggtgatctgcctgccttggccttccaaagtgctgggattacaggcatgagccaccgcgcccgscctgcccctttccaagagatatgctcagcataatgagagatcaaccgtggtggggagtgggtccaagtaagggttctcattgttgccttttaagaggcctaagtcctgcattaactcagtccaaccattaagtgatgcaggctgctcttccctcatgtgagaaaaacctgtttccctctggttcttcctggctttgcacctggtggctattacaaagcagtactgcagtatgtcttggacctggaaagttggacatgtgtgtggctcaacagttttctcgggggagttcagtgaccttttggtggccaccctctgttctcacctgtgagttcttgcaggtggcgacttcatctgcaaggtcacttacatagccccactcagctgcttcggaaagcgtgacgaagcagtagtcctcagtgtgtgtgtaagtgaagaggaccttgtggtagcagggaccatgcttcattcgtggctgtgtccccatctgagggcctggtatgcartaagatcaataaatacttgtggaatgcatgactgctggctgcctgtgtctgcctggygggagagctgtggaactaggggtccacatgaggacagactactgtggtgctgcctacctgccaggctggcccaccttccccacccccacttgaccttactctcttgaggtcctaaaggtatgattcagacctttcagccctttccagaactttgaccctctggagacagggcggttctgcagggggcggtctagcccctagctttgttctgggcagcccaatcagctctggattgcccgagctgccctgaagagtcagccgaaagagctggaggcttcttccctgtggttgcgggttcctgcattctctgctctaaatcccagcctgcccttggggctgcccacgcccccttcagatcctttgctccggagagagacctgtccgagcagaggcctggactacatctcccggcgtgcctggcagtgtggtggcctctgtgcgccgtctgcactcgttgcaggcgacgatgcagagggctgtaagtgtggtggcccgtctgggctttcgcctgcaggcattccccccggccttgtgtcgtccacttagttgcgcacaggtgggatagagggtgctgatcttggagggtgggggagggaagcggctgggggctagggccctggtggcactaagcccagccgcccacaggaggtgctccgcaggacaccgctctatgacttccacctggcccacggcrggaaaatggtggygtttgcgggttggagtctgccagtgcagtaccgggacagtcacactgactcgcacctgcacacacgccagcactgctcgctctttgacgtgtctcatatgctgcaggtgagccaggggagcacactggccatctgatcaggccttcctccctgtttacagtggtccactccttggctttgtttgctgtgaactggattccaaggacagccttctcagaagagctagaggtcatgggggtgtcatggataggtcaatggccccaaggraatgagctcagagggtctcatcatctcatccttctagcttgcccccattaaatggtgtgccttaatgtcccgggttttccagggctgacacccactctcatgtattgggctggatgttggtttsaaaaggggttatttcaggaaggtgctaggtcctgtccagttccctggcagtccccccacacagagtgactgggggaggtcaggaaatcagaaggtggtcctttgccacgtgtagaaccaaaagactggttagtcactktgggtgggctggactgcactgtggatggcagggaggatgcatccttgcttagtagccttttggattgtagctgttgcaatggcctgaggctttcaatctcttccccagaccaagatacttggtagtgaccgggtgaagctgatggagagtctagtggttggagacattgcagagctaagaccaaaccaggtgggcccttttatttctgctctatgagttttcttagtcatgagccagcaaatgggctgagtccctacctcaggcttaggggcacagagatgagtcaaacacagcttctcagggcttgcagtcttggacagaatccctgagtcatttccagagacacagacatttgtagggaggggaatatcccagtcttactacatcaggctaggaggccagaaaccaaggttaatatgctgctctctggccatcccttctgcttaacccctctctattcaacatgtggtccctggccaggcgacgtgactcaaacacctgtaatcctggcacttggggaggccaaggcgggtggatcacctgaggtcaggagttcgagaccagcctggccaacatggcaaaacctcgtttctactaaaaacacaaaaattagccgggcgtggtggcgcgtgcttgtagtcccagctactcgggaggctgaggttgcagcaagctgaggttgcaccactgcactctggcctgggcaacagagtgagactcagtctaaaaagaaaaataacaacaacaaagtgtggtctctaaaccagcatctttggagcttgttaggaatatagtctcaggcactgctgcagacctgctgaatcagaaccttcattttaacaagatcyccaggtgattcatgtgaccccctcaacctcaggctttttgtccatccagtggggaggctaaggaagttttttgggggcattgctatggagtacttaggagagcctgcgatcatcaagatgacctttgaagcttttgtcctgtgggttgccacatgggctaagtcgtcccaggtttgggtaggtgaagcagcaggtcctaggtgtcatagattaagtgtcagatgggactctcagtacagagtggggaggggtgcagaggttgcaccagatcagggaagcaccccaaggtagggaggggatgaaaacttacttgatgcatgaggatcaaagaccttggacttgggcccagacttgtaccttgcacaccctgagtccttcacattagggttcataaccttttggtaactaagtgggtccagggttgtgtctggctcacccttggccttgccctcctggacctggaagccaaaacgctccactttggtcctaggggacactgtcgctgtttaccaacgaggctggaggcatcttagatgacttgattgtaaccaatacttctgagggccacctgtatgtggtgtccaacgctggctgctgggagaaagatttggccctcatgcaggtataccccctctgtgttctagacaccttgtcttccttgttcatagagcagtatccttgttgtccaagacagggttggcacagacaagggacctggaaaatggctctttcagtgaatgaacagctatgagactcaagagcaggccctctctggagcacgccagggtttggtggtgggggattaccaggcatggggagggggtcttggcccctctggtgtgaggtggcagaactgggcttgggtcatctctatcacttagtagctatgtgaccttgtaagatgggaaccagcctactacctttttttttcctccctcctcctcctcctctccactgtcctactactgtccagctctgcagcgtccagcccatggtagctgctcagtaagtggccccagatgctcttgtgtttctgtcttttaggacaaggtcagggagcttcagaaccagggcagagatgtgggcctggaggtgttggataatgccctgctagctctgcaaggtgagagggctgggctggggttggagccaacctttgccttcctggcttcattgactgcttagcacagaggccataccaagaagaatgtgtggaaggtgtgatatttgtgtgccataattttaagttttgtatcttgccctcctcctacctaccacaaggctccatgggctagggacaagggcatcttctcccacttgcagagtaagacatgctcagggcttgttctggtccctgaataaggctttagtccagctttgagggatgctgggacctggatacttggtcactggctccctgggcccaggccccactgcagcccaggtactacaggccggcgtggcagatgacctgaggaaactgcccttcatgaccagtgctgtgatgraggtgtttggcgtgtctggctgccgcgtgacccgctgtggctacacaggagaggatggtgtggaggtgtgtcaagaagtggtgtgggggcagtacagggcacaggatgcatgtgaggggttgggggtatgtggtacagggagcttcccatctgccctctggtgtttcatacagatctcggtgccggtagcgggggcagttcacctggcaacagctattctgaaaaacccagaggtgaagctggcagggctggcagccagggacagcctgcgcctggaggcagrcctctgcctgtatgggaatsacattgatgaacacactacacctgtggagggcagcctcagttggacactgggtgagctgggccagcactaaaggatagggtcctggaggtcagggtgacccttgataagactagccagcccatgactcatccaaaggttatgtagcctgaagccttcctgagcctcccttccctgaaggtgccactgtgcctttgcccattagaaactgcagatgttggccggatgcggtggctcacatctgtaatcccagcactttgggaggccgaggcgggtggatcacgaggtcaggagatcaagaccatcctggctaacatggtgaaaccccgtctctactaaaaatacaaaaaaaaaattagctgggcattgtggcgggcgcctgtagtcccagctactcgggaggctgaggcaggagaatggcatgaacctgggcggcggagtttgcagtgagccgagattgcgccactgcacctccagccagggcgatagagcgagaccccgtctcaaaaaaaaaaaaaaaaaaaaaaaagaaactgaagatgctgccgggcatggtggctcacacctgtaatcccagcactttgggaggccaaggtgggtggatcatgaggtcaggaattcgagaatagcctggccaacatggtgagaccccgtctctactgaaaatataaaaattagccaggcgtggtggcgggtgcctgttatcccagctactcgggagactgaggcaggtaaattgcttgaacctgggaggcagagtttgcagtgagctgagatcgtgccactgcattctaggcctgggcgacagagtgactccatctcaaaaaaaaaaaaaagaaactgaagacgctcggcaggtgggcagcatggcctccaggggataggaggtggttggttggctgacggcagtgaagggaggaatagagcctggagtagcccaagcaaaggggccttgatgctagatagtgtgttacttgaggacctcataaggacctcctgtggccagggcttctatgggctgtggcttatgtctcatgtgtcattctccagggaagcgccgccgagctgctatggacttccctggagccaaggtcattgttccccagctgaagggcagggtgcagcgraggcrtgtggggttgatgtgtgagggggcccccatgcgggcacacagtcccatcctgaacatggagggtaccaagattggtaggtggaccagggaagctgggaaacccttgtctcttcccaggagggtgggggcactggcagggtggtgctgatgcgtggcttatgcttgcttgacaggtactgtgactagtggctgcccctccccctctctgaagaagaatgtggcgatgggttatgtgccctgcgagtacagtcgtccagggacaatgctgctggtagaggtgcggcggaagcagcagatggctgtagtcagcaagatgccctttgtgcccacaaactactataccctcaagtgaagctggctcagggtggggctgtcccttccaggagttttgcccctacaaggggttagtcaagaagctgaggcagaactcactgggggtgggcagttaaggtggaggctgattctaattgtctggttgaggggccacaccacctattccccccacctaactcatgccattccagcttccttcaggaccctgcttctgagtgacggaccagctcacacaatgtcttgtttcagtccatgatcccactgacctactcttgcctgctggagggtaatgagaagctttggttctgccatctctcccactctgccaggtgctggctgtggagcaaaggctcacctttgtggagaggataaaacctrcccaacctacctcaccatggtttttcacattgcaaagggtaataacatgggcagtgcggacttaggctaccccctccagtttgctttccgtaaatgcaaattgtccttactgcaagtcaggaatgattgctgactcacagtagggctgctatgcctgtgtgtaaacttggggatggctgagggaacatagactcactcttccacattcccaagttggtctagtgtgctgcccagtagcaaaccatggcagactcaccacctattctgagttccagggctgctgtagggcagggtgggcttcctcccagacytgccttaccctgggctgatctttgcycctggtatgcattaatggactccactgaatcctgaaaaaaaaattaaacttccttcttacttgccagtctctagcttcattgttctctgttcacagggttcctgaaatgccaacccaatgcctgccttcctggcctccaagacaagcttggaataggttctccttgaaaggggccagtctataaaaatggagatattgcccctgttgggcaccccatccctgctcctccagggagctgcatcacctctcccctccctgcaagttattgcatctgggtcccaaggggcaacagcttccaggatgttccctctctcactgcccctgtgcatgcacacccttgttctgtctgaataaccacaacaaccgatgcacttccgtgtttaataagccacatcctcagttgagcctggggtgaaatgtgagatcctgactctgtgcagtartattagtgggtgggccaggggctgtgaataacatcatcctcagtacagctgcaattccagggcccctctaccacaaagatggcttaagcaaaggcagccagatggaagtatgatatccaacaggaaggaagtaggcaggggtcactaaagtggctggtggcccagcagatggaaacagaagtatggccccgagggaaggaggcaggtccagggctacagtgctttcaggtactggtgtttctataggggcatttgccacccacatctttggaaactcccctggcctattgtgacatggcagggctgcctggttcttgaaggtagagaagatgctagtggggaggagctgagcctgtgacgtgcatttgtaccaggtccagatgggaaatgatgaggctgcaggctatgatggggccactgtgcactaaatgcttggtaccatcctatgaggggacaaggtgcagacccacattcccataggcacttaagcagtggtggataggaggctaccccaggggttcagctgtccttcaggtaatcagcttacccccaagaaggactgagaggaatatgagtaggacagttggcagatgacaatttcctttgcctggctcacgggagaagtctggttgggccaggtatgtgggtgtttggtgcctccatctggatagtgccagcaggtacaccaccctgccttatacctgaatggccagctaaataaccatagagcttaaggtctggctcaggtcaggattccctggctccttgccaacaaagcaaaaccagagattcagaaaactcagggcctaggagaaaacagacctgccttacaaaccccagagctggtcaacctcaggcttcctctcaggaaaaaaattttttttttgagatgggtcttgctctgttgcccaggctggagtacaacggcgcaatcttggctcactgcaacctctgcctcccaggttcaagcaaatctcctgcttcagcctcctgagtagctgggattactggtgtgtgccaccacacccggctaatttttgtatttttagtagagatggggttttcaccatgttggtcaggctggtctcgaactcctgacctcgtgatctgcctgcctcagcctcccaaagtgttgggattacaggcgtgagccaccatgcctggccaactcaggaaaaatttttatggggtcacatcttggggatggaagagggacaggaaaagaaacctaagacaaaagaactgatggtcttcccaacccagaggcttcctgagttatcacccctgagagaggaagaacacaatctctctccttaaggcacccagataagagtacaggcaaactcttcacttgcccagtgcctgggtgagggagcaggcttaagaggcagaagaggcccagccctgtaggcactgggtactccctgctaccaaccctgaacccccggcagttgtccctgaggtctggggagtagcagaacccagtgtagaagccagcagacccagtgatgcccttggagaccctctgctgccttcccttattctctgtgggttttgagaggttcgtttgctgccatttccctgaaagtgatggagagagagaagagagagtggttattccatgggcagaacagttgctgaaattggctctcccaagctccttcttgggggctgagctaggctcagtaaggtcacataacaatctagacctctctgctggtctcccacagcccaccctgggcccagcaccttctccctgcagactcattcttcttcctggttctccatgttagtacggcattgccatccttctctagtttttttattctttttatttattactattgttattacttttctttttttgagacggagtttcactcttgttgcccaggttggggtgcaatggcaagatctcagctcactgcagcctccacctcccgggttcaagcaattttcctgcctcagcctcccaagtagctgggattacaggcgcccgccaccacacccagctaatttttgtatttttagtgaagacggggtttcgccatgttggccaggctggtctcaaactcctggcctcaggtgatctaccctcctcagtctcccaaagtgctaggaacaggcgtgagccaccatgcccggcctgttattttttttgagacagagtctcactctgatgcccagtctggagtgcagtggcgtgatctgggctcactgcaacctctgcctcctgggttcaagtgattctcatgcctcagcctcccgagtagctgggattacaggcgtatgccaccatgcccagctaattttttctatttttagtaaagacggggtttccctatgttggccaggctagtctcaaactcctgacctcaagtgatccgcccatctcagcctcccaaagtgctgggattacaggcatgagccatggggcctggcctcttctctaagacagaaacctgggcagtggcagcctttctaacctctagccctaactcttggacccctttatctacttgccatgaagtaggcatttataaaggcaaattagatcagaccacagccttgctgagttagtctttcaatggctcccagggtccaacaagctctcacgttcaagctccagcatcacagtcttacctattctaatatgtcacccgtattcttccctcttagccttgctcaatccattccctttgcttggtacactttgtcaccctgtggcatttgatctcggcttaggtgtctttcttgggagaagccttccctgaccacccttgccccatgcactgccgccctcccctaataaatccctggctccccatgagcagggcccgggttgtctttgttctctgggcctcgtgtggcccctatcacgtgataggggcccagagattatctgaatgaatgccctgattagtgagcgcatgttttgcagaagaggaggctgaccctgatgaggtcaatgtgctcaggacagagattactgccttcccaactgaggggattgtgcggagtggaatccaacaaacctgtcatttcatctctctgaaattatgacaataccaccacctatcctacaggctgctgaacagcatgatgatggactgtccagaccttggtgtcaccctaacttgaagcctgagctctacgtgcagacttgaagcttgctgcaaaggccattaagctggtgggcttaaagcctgagaactcccctctctgtcaccagcacaggagtgtccttggaatgccaagcatggggttgcggtatggacagatttactcaccacgaagggaaatgcgtggagccatcaggcgtggatccattctgaccacccagacctggaggcagaaacacatccagagctgcagaaggctgggrtgggaatctgagcaggcatcagcccaggtcaggttagagaccactggtattgtttggtgaagtctggtgagggtcctaagggactaatggtattgccaggtgagagttctgaggaacagatacaatgtgatgggtggactggtggggattctggcgtaaaatggtatggtggcatgagtcagggcacaacgttaagttctcccatccaagtacctggcttagcttccgaggtcagatgcgttcagggtagtaaggccgtgaaccaatgttaagttctgatgagcctcttgcaggatagtggggaacccaatggtacagtcgggagagggtgggggcgggggcggccagcccacggaggttcgtaggaagcctcacctggacggtgatacaacccggtcactgtattcccgtagaacccccacgccagctggatgcccaggagacttaacaccaaccacagcagcagcagcttgaagagggtcacgcgcatgtcctgcgcctcccactcccgcaagaactcgctgcccagcgcgcccagcaccgtggccggcagagcctgcaaggcctgcccagaccaggactccgccatgactggccctcgccccacccggggtactgtcaccgtagtccccaccacgcacgcgtgtggtcttccgggaccaggcccgttagtgcgcacgcgtaaacccagccagggtggggcctacttcgcgtgcgtgaagagttggcagttcggggaggagtattaaaaccgcgcacgcgcacctaaccccaccctgcttgcttaagggatgagtgactccgggagtayaaaatagcaaccaggtcttttatagccccggagttcccgtgatgccccacgcggctgcaatgattggttaagggttttgcttttagggcgtggacgggctcctgagcaatagtggatgagctgtgagtgcgcgcgcgtgcgcggggccgcgacctgtgccggctcgagcccgctgggcactcggaggcgcgcacgtcgttccccgccctcccgccgccgcccgccctcgctctctcgcgctaccctcccgccgcccgcggtcctccgtcggttctctcgttagtccacggtctggtcttcagctacccgccttcgtctccgagtttgcgactcgcggaccggcgtccccggcgcgaagaggctggactcggattcgttgcctgaggtgagcggaagggttccctccaggcgccgcggggccccaggcccgccagcccggtactcttccggccggcaggccgccgcaccgccgcggccgcgccccaccggctgctcgtggccgagccgcccctggcccctgacccttgacctgactcccagcccgggccccgcgccccaagcggcgaccccgcccgcgcagtccccggaagcgcgcccggtagtctcctgtgccccttyccccgcccggccgggcctggtggagcccaggctgcccgcctgcccgccctcggtccccggagcttcctctcccagcggcgccgggcagggcgggggctttgggccgggccccgcgaccgcgcagtgtagccggccgctgaaagcgcgcgtggctgtcggagttgaaatgggaaagaaactctttacaactccattttgctttttacgtttaacgagaaacgacaatcactgttttatattgattaaagtccagttacactttgggtaggttttcttttaatgcagacttgttggagactgtgtaagtaagtaaaagattgtattgaacgcttaggggtatgatctacggccataccacctcgaacgcgcccgaactcgtctgaaagctttggggtctgtattgagtggaaaaggggtattttccatttggaaaaaaaaaacaacacacaaaactgtaaatgatttaagcgatgttgcatgaaaatagatgcaatgttgcttagtcgaagtcgctgtattgattaggaatgatctaaacatctgtaccttagttactgattggatctacagttacgggtcgtcttcattgaatagcgctattcgcatccaagttgatttgttcacaaaccttgtttagtagtttacggtggaaaattggaatcctttttacctcaaagttggttccacttgtgttttttaatagttctgattttaaatttttacctctgttgttgacttgtttggttctgtcttgaagaaagtcttaaacgtttcttgcaggtgtgtaagtagatatttcactctgcctttctgaaggagaaaaattgaaaaaccaaaaaacttccataatttaaaatgt

SEQ ID NO: 94498 - DNA, 82922 bp, Homo sapiens
  misc_feature (1)...(82922): n = A,T,C or G
ggccagggccatgacgtagagccaggcagactgactaggtcacagccatgctgggcactcacaccgcttccccacaggggtctggcttatgtgtgccaccagcgaggagaggagctcaaaggccataatactctgccttcaccctggagagaccgtcccatggaggagtcactgctgctctttgaggtggggtcctagaggagcatctgggtttgggtgggccaaggtgctgagaatgagatgctcctgtgcttagagacagcctgagtccttgttcccctcaggcaatgcgcaagggcaagttttcagagggcgaggccacactacggatgaagctggtgatggaggatggcaagatggaccctgtagcctatcgagtcaagtatacaccacaccaccgcacaggggacaaatggtgggtgtagaatggggtggggtggtggggctgccgagcagggcgatgggccatggggtagggcagagtagggctggatggtagggcccactgcctatgccccacaggtgcatctatcccacctacgactacacacactgcctctgtgactccatcgagcacatcactcactcactctgcaccaaggaattccaggcccggtgagggagctgggtccatggggtggtagggccagtggaattccagcagcccttcctgtggtctctgcctggttccagagctggccagtgctaaccctactctcccaccccagacgctcttcctacttctggctttgcaatgcactggacgtctattgccctgtgcagtgggagtatggccgcctcaacctgcactatgctgttgtctctaagaggaagatcctccagcttgtagcaactggtgctgtgcggtaggtgcggctgtttggcttatgaaaggttaatggcatatgctcccaaaggccttctcaccaccttcttatccacagggactgggatgacccacggctctttacactcacggccctgcgacggcggggcttcccacctgaggccatcaacaacttctgtgcccgggtatagcccagcaggttgggtagatacattgggggttgagtgtggcagtttgtgattgtagctgtgactgatgctgaactttcctgccaggtgggagtgactgtggcacaaaccacaatggagccacatcttctagaagcctgtgtgcgtgatgtgctgaatgacacagccccacgagccatggctgtgctggagtcactacgggtcatcatcaccaactttcctgctgccaaggtgggcctgcctcaacatgtgtgtcacatgtgtgtgtgtagctgggggtacacttggctctgggcatgggggtcctaatgctgagtatgactcatacctgtctcctgtctcctgctatagtccttggacatccaggtgcccaacttcccagctgatgagaccaaaggcttccatcaggttccctttgcacccattgtcttcattgagaggactgacttcaaggaggtaaattgtgggggtggagggtcccgtttgctgctgagtctggtactgggaacctttcatctcctcatctctgtcagtccatctacttcctgcttcagatgaaccaatctttgccagacacgggggtagggaagcttccccacttgtttgacccttgcagcctcatgtgtctaccccacttcctatctctaggagccagagccaggatttaagcgcctggcttggggccagcctgtgggcctgaggcatacaggctacgtcattgagctgcagcatgttgtcaaggtgagagccagctgcagccttcctactgcagtgcctgctggggccaagatgtgagtatagcctgcagtcctcgttgtggttcccgggtctaattgctgctcccctccccccacttccagggccccagtggttgtgtagagagtctggaggtgacctgcagacgggcagatgctggagagaagccaaaggcctttattcactgggtgtcacagcctttgatgtgtgaggttcgcctctatgagcgactgtgagtgaacagagctggggtgggggcaggtacaagatgcacattgcctgctatggctgcccagctgggggtatgaccttcactttggctgcagattccagcacaagaaccctgaagatcctactgaggtgcctggtggatttttaagtgacctgaacctggtaggttcatgaggtttggggtgagggaggtaggcctccctggttggatggttgcctgagttccctgcctgcaggcatcactacacgtggtggatgcagcattagtggactgctctgtggccctggcaaaacccttcgacaagttccagtttgagcgtcttggatatttctccgtggatccagacagccatcagggaaaggtgcttgactttactcacctgccctcatctgcagcagtgacagtggctgccgttcattgtgccaagtgctctgcatacattcccttagttaatcctcaccacctgagggagttggtattcatattctactagtgaggaaactggcactgaggataactccaggcacaaaattttgtatgaaggctgcctttttttttgagacagtcttgcactgtcgcccggggctggagtgcaatggcaccatctcggctcactgcaacctctgcctcccaggttcaagtgattctcctgcctcagcctcccgagtagctgggattacaggcgcctgccaccacacccggctaattttttgtatttttagtagagatggggttttcaccatgttggccaggatggtctcgaattcctgacttcatgatctgcccgcctcggcctcccaaagtgctgggatcacagtcatgagccactgcacccgacctcttttttttttttaattattattttttgaggcagggcatggtggctcacacttgaatcccagcactttgggaggccaaggcaggctgatcaccagaggcagggctaccaccagnnnnnnnnnnnnnnnnnnnnnnnnnnnnnaaagatattatttttaatatctttcgttaaggcagctaataacctttctttttatttattttagagacggggtcttactcttgcccagggtggtgtgaagtggtgcaatcatagctcactgtggcctcaaactactgggctcaagctattctcctgccttagctgagactacatgtgcacactaccatgcctggctaattttaaaactttttgtagaggcaagttctcactatgttgcccaggttggtcttgaattactggcttcaagcagtcctcctgtctcagcctcctagagtgctgggattataggcatgagccactgtgcccagccaccctgccatccttttttttttttttttctttttttgaaacagtatctcgccctgttgcccaggctggagtacagtggcacgatctcggcccactgcaacctccgcctcccaggctcaagccattttcctgcctcagccttccaagtagctgggattacaggcacatgctaccacgcccggcaaatttttttttttttttttttttttttttttttttttttttttttttgagacggagtctcacatgtcgcccaggctggagtgcagtggcacaatctcggctcactgcaagctctgcctcccgggttcacgccattctcccgcctcagcctcccaaatagctgggactacaggcgcccgccaccactcccagctaattttttctattttttagtagagacggggtttcaccgtgttagccaggatggtctcgatctcctgatctcatgatccgcctgcctcggcctcccagagtgctgggattacaggcgtgagccactgcgcctggcctaatttttgtatttttagtagagacggggttttgccatgttggccaggctggtcttgaactcctgacctcagattatctgcctgtctcagcctcccaaagtgctgagattacaggcgtgagccactgcaccagcccaccctgtctttcttactccttaaagtagggggcaaacatggtggttgttataatccatataaaactataccctggacccccacggtggttgttatggtccatataatactatagcctagagccccattcagtcccttacccaaagtcacaaagttattgaggacccgggcctcctgacccttagtccctcggcttctttggcttaagaaggatgttagggggaggtgtctgtggtgaaacctgcccaggcctccctggccttgttctgggttggtggtcatccttttccctctgccctccagcttgtctttaaccgaactgtcacactgaaggaagacccaggaaaggtgtgagctggaagcactgaacctacctcatcctcctggagggtgtggctaccctcgccaccccaaattccatgtcaataaagaacagctaaattctcctagagtctgtgtgttatctctgcacttctagcatctgaaggccctgaagacatgctggcggtggtggtatgattgggggatggagatgtgccttttgcacattttgtctgtgagaatggactttcccagaacagagtggtactgacagctttgaaagcaccggtgcactttttggtgcttaaaggcaggggcctgggtaggattcataccctccgcacctggtctgagagaatggagggccctggggtgtttgtccatggttaggacccctgtgccagagggatctaaaaggtttgtttctgctggtgtggagaggcctagctcccagtctgatcattcagcatataatttttttttttttttttttgatacggagttccactctagcccaggctggagtgcagtggctcaatcttggctcactgcaacctctgcctcccgggttcaagcgattctcgtgcctcagcctcccaagtagctgggattacaggcgggcgccaccactcctgaataatttttgtaatttcagtagagacggggttttgccaaattggccagactggtctggaactcctgaccccaggtgatctgcccgcctcggcctcccaaagtgctgggattgcaggcgtgagccactgcgcccaatcagcctataattcttttttatttttgagacggagtctcactcttgtcccccaagctgcagtgcaatggtgtgatctcagctcactgcaacctctgcctcccaggttcaagcagttttcctgcctcagcctcttaagtagctgggatcacaggcatgcaccaccacactcggctaattttgtatttttagtagagacggggttcaccatgttggccaggctggtctcaaactcctgacctcaggtgattcacccgcctcggtctcccaaagtgttgggattacagacttcagccaccgtgcccggcccattcggcatataatttttgagtgcctactacgtgccaggcaaagtgagatggggcatacgtgctgtggtggccttccaagttcacgggaggggaaatgggtgaccaagcactgtatgggagcggtctccctggggcctgtgcaagactggaagaggttcctgacccagcctgggcctcagaaaacattactctaacgaagtgacttctgaagggaatcacgaaagactacggggagtttgccaggataagaggaacaagggcaaaagctccgaggcaaaaagagtctacagcaggctggaagccctctgggggcagtgtaggctgctgctgaggcccgagtgtgcctgcagctttaacgccttccacattttccctgtatacaaacactaggctacccgggggcccgctttaaggtggacccaactgcggaaggctgaactcagatggcagcagacagcgggagtaccagatgctgactcctccaggaggtgagcaacctagaggcttcccaggcagggcacggctggggacgccaggcccaggacagaagtttgtggggtccaccttaagcgagaggccgagcctggccaggccccgccccgcgtgggcgtgctcgaccaaaggaggctctggcgggcgacggaaggtgggtccaaagagctagcttggagccctagccttccgagactccactactaggccaagccacggccctagctccgccccacatggagaggcgtccatgggcggagcgagccgctccataccctaggatccactatccgctctagcggccagaagcgcggccaccttcccctgctgaagcgttcactttaattttggccggtaggcagtcccagatctcgcgggatccgacgccccgattatcgcgagaggagcaatcggctcctattggctgtgagggttgaatgtaagatggcgcccagggagctgtgaggagaaaaccctgtcggtcttggagcgacgacggcagaaccagggtccctggcggtgcggcggggccggcgggtgcagcggaggcggcggcggcggcggcagtgacgtcgccgggtgagggctccagtgcgggtggggatgcggcgaagctgtaggcctgagacggggggcccaccccacacaacggcgggcgggggcgggcgggccactaccgctgggccctggagagttcggggcggctccggagccgaaaacgttcctgggctagcgcaccccgccctgtggatgggggaggggtggcccggggatttgggtgggcgcggcgcgagatggcgcgccggtgcgggcgcgcggctgagcctgtttttacgcgcgcgcgctgtgcggctctcggtgcgcgtggccgccgacgtgcgcgttcccggcccggatatctctgctctaggagctgtggcccgtgggcaaccgcggctttctggagcgcgcgcccgtgacgacccccagttttggggcgcgcgctctgatatcgggtggcggtgctgcctcgagagcgcgcaggaggcttctgctgagcagagggccggccgcggctcgttgcgctgggaaggttgaggattgggtcctttctggtctggtgacgttcccgggcatccgtggcctcggcctggagagaaaccaaccagctttgctgtctggcttgcggttccgctcctctgtgaggggggcgagattgcccgttctcctcgaagaatgccgttacttgaggcccaagtacggtgcgggtgcttgggtagggtgtttctctgcttcggaaaccaagccctcttggtttgagagggcagtgagccccttcggatttcctcaccttgtactgggctttctgccgggcagggaaggttaatattagaaggcccttgagtggtacctgcttatctttcattagaaactaatacgtccataagcgtaattcatacacgtcacctctgtgcgctccggaagggaattcgcttatgtggcccatgtgaactccgagctctaaaatgccagtttaaatccttaaacgcagcttttcttttgcgtaagtgggaggggcttactttattatattaaaggcccacctttgcctcagccaaaaagttggccttaaacaaaatggaacaacctgagaatcagtgctttaccttttttgaaattgcagaaatcccagcagaaattactaaaatctgatagtgtatcactgtaaaagtcacttttggtgtaggatttcagtccttttcagctctttttttgaccctgccgctgtgttttggtgtcaaggaagttctaggtttgttctagagaaayaggcacctcttttttctaatacaaaacatctgctagtttgatttacagtcttgctyaattaagcttaaggaataggaagctaagaggaagtaaaattagccatcaaatttgataatggtggggtagttctttctaatgtactgtattgtttttaagaacaaagttaaaattattaataaaaagaggctgaggatggaaggaacttttttgttctatcttcttcagaatattagaagtcttaagaactcaggacaagcagcagaaatacatgcaacatggtgactggtgagttaaaattgttcatatcctggaagtatctgtgcacagttttttttctggtaatactgaagcattacaaatcctgtcaattctgggtgctgtcttccagaaactattaggtgctgtaaaatgaagatgtgggagaacggcatctttgaattcagccacagttcgctacttgctcagttttctcctcttaggatataagtcagtggaacccgcagatttaagcgtttgcaggctcagcttttaaacggacctaaatggttcaaagaaaagctgtaaagtttttctaggatacacttaaaattttgactttttttttttttttgagacggagtctcactctgtcacccaggctggagtgcaggggtgtgatctcggctcactgcaacctccgcctccctggttgaagcgattctcctgcctcagtttcccaagtaactgggattacaggcatgcagcaccacacctggctaattttttgtatttgtagtatagacggggtttcaccatgttgatcagactggtctcgaactcctgacctcgtgatccacccgccctcggcctcccaaagtgctgggattacaggcgtgagccaccgcgcccgaccaaattttgattaattttttaggcttgcttgttctgggttatctttatttttaactattaagcttgagatcttccttttaaattggtgtttataaatactttttctccaagtttgtcaactaagatttacttattagatgtcttccttcgggtcctctctgatgaatttttcctataactcttcgagaacctctgcagttccacatcctctctccagcttatgttgccatttcaaactaaagatcaaatagtggtttaattttcttgtaaatttgaattgctctaggaaagtaaccaaagtcaggggctctggatgtggctgcctttctttaaggcagcttcagaatcagggatgtctttccttactttggatatgcttttttttttggatatgctttcttttagtttaattagttgtggtttatacttcatgtgccatatttctttcttgtctgctttttaaatggccactcttgatctgtaagggtctctgatttctgaattagccttagaattaggtgttacatgaatacctgttcttttctttttatttttattattattttttgagacggagtctcgctctgttgcccgggctggagtgctgtggtgcaatcttggctcactgcaacctctgcctcctgggttcacgccattctcctgcctcagcctccggagtagctgggactgcaggctcccgccaccatgcctgtctcattttttgtattttttagtagaaacggggttttactctgttagccaggatggtctcaatctcctgacctcgggatcctcccaccttggcctcccaaagtgctgggattacaggcgtgagccaccgcgcctggcctattacctgttcttttctgttattctgttgtactgcattttgttccagatgttttaagtcctcttcagacttcacttaaatgcttcctttgtattttttcctagttattacattagattgtgatttctgttattaaattgatgtggctgcatgaagaaatggtagattaatttcttcctttgctgaaagagggaaggagtgctcctttggtctcactcttcaggccagggcaaaactgtaggtagaaatggtggctgtgtcagaaggctaatatttttctctttttctcttttctcttttttttttttttttttgagatggagtttcactcttgtcgcccaggctggagtgcagtagcacgatttcggctcactgcaacctccaccttccgggttcaagcaattctcctgcctcagcctctggagtagctggaattacaggtgcccgccaccacgctgggctaatttttttttttttttttttttgagacgtagtctcgctctgctgcccaggctggagtgcagtggcacgatctcggctcactgcaagctccaccttctgggttcacgccattctcctgcctcagcctcccgagtagctgggactgcaggtgcctgccaccatgcccggctaattttttgtagttttagtagagacggggtttcaccgtgttagccagcatggtcttgatctcctgacctcgtgatccgcccgcctcggcctcccacagtgctgggattacaggcgtgagccactgtgcccggctgatgtctggctaattttttgtatttgtagtagagacggagtttcactatgttggtcaggctggtcttgaactcctgacctcgtggtctgcctaccttggcctcccaaagtgctgagattacaggcgtgagccactgcgcccgcccatgtttttctttgttttaaaatttgtgaaatatttatccatccatgtaaatttaggcgatctctgtacaatttaatgacaaattataaagtaaatgctggcgaaagtactactttttcaagaaataaaacgatgccagtatctctgaacccttcgtgggtcccttcctgatcacagcttctcaagccgtacagacagctgttattctgtgataacattcttcttctttttacatttaccatctccgtagcccttaacctagtttagatttgtttccttatgagttttgtataaatggagtcatgctgtattatgttgtcttagcataatgtttctgaaatttgttcacattgtgtgcagctgttcatttccattttttatgtagtattctgttgtatgaatacaccataaggtatttatctattccactattgatagatatctgggttgcttccagcttttggctcttaacaatgctgctgtgaacattcttgtattaagtacccttgtttaaaaaaaagttccttcatatatactgatgggtaaaattgctcaggttcgtggaatggatattttcagcttcactagataatgcaagtggttgtgccagtttacaatccgtcaatatttgggaaaaatacaaattttagtttcctgattgaaaatagaaccatggccgggtgcagtggctcatgcctgtaatcccattactttaggaggccaatgcgggcggatcacctaaggtcaggagttccagaccagcctggccaacatggtgaaatcccgtctctactaaaaatacaaaaattagcagggcatggtgatgggcgcctgtaatcccaactactcgggaagatgaggcaggagaatcgcttgaacctgtaggcggaggttgcagtgaactgagagggcwccattgcactccaagctgggggacagagcgagactccatttaaaaaaaaaaaaagaaaagaaaaaaagaaaatagaaccgtgatgaaaatgcccctaaaccagggactcctctggcatggggcatataaatggcctaatgggataacttctatcacaaaccctgcagttggctagtatccttaaaaatcgaaatatgggtggaacacagtgcctcatgcctgtaatcccagcagtttgggaggccaaggtgggaggattgcttgagccccggagttggagaccagcctgggcaagatggcaagaccccatttctacagaaaaataaaaatagctggatgtggtagcatggacctgtagtcccagctactcgggaggcagaggcaggaggattgtttgagcccaggagtgtgaggctgcagggatctatgaatgcaccactgcattttatcctgggtagtggagcaagaccttgtctcattaaaaaaaaaaaaaaaaaaaaaacagacaaaagcctggtgcagtggctcaggcatgtaatcccagcactttgggaggtcgaggggggccgtggaaatgaactcctcacctgaggtcaggagttcgagaacagcctggccaatatggtgaaaccccgattctactaaaaatacaaaaaaattagctgggctgggtggcgtgcgcctgtagttcaagctactagggaggcttgaggcaggagaaccacttgaacctgggaaacggaggttgcattgagccgagatgatgccattgcactccatcctgggtgagaaaacgagacttcgtctcaaaaaaataaaaatacaaagaaacaaaacccaggcaaaagaatagaaatacgtcaattctggtcgggcacggtggctcacgcctgtaatcccagcactttgggaggccgaggcgggcagatcatgaggtcaggagatcgagagcatcctggctagcacgnnnnnnnnnnnnnnnnnnnnnnnnnnnnnnnnnnnnnnnnnnnnnnnnnnnnnnnnnnnnnnnnnnnnnnnnnnnnnnnnnnnnnnnnnnnnnnnnnnnnnnnnnnnnnnnnnnnnnnnnnnnnnnnnnnnnnnnnnnnnnnnnnnnnnnnnnnnnnnnnnnnnnnnnnnnnnnnnnnnnnnnnnnnnnnnnnnnnnnnnnnnnnnnnnnnnnnnnnnnnnnnnnnnnnnnnnnnnnnnnnnnnnnnnnnnnnnnnnnnnnnnnnnnnnnnnnnnnnnnnnnnnnnnnnnnnnnnnnnnnnnnnnnnnnnnnnnnnnnnnnnnnnnnnnnnnnnnnnnnnnnnnnnnnnnnnnnnnnnnnnnntttttttttttttttttgagatgaacctccgcctcctgagttcaagcaattcttctgcctcagcctcccgagtagctgggactacaggcgcatggtaccccgcctggctaatttttgtatttttagtagagatggggtttcaccatgttggccaggctggtcttgaactcctgacctcgtgatatgcccgactcggccttccagcgtgctaggattacaggcatgagccactgcacctggcctatttttttatttttattttttttaaatttatttttcttattattttttgagatggagtcttgctctgttgcccaggctggagtgcagtggtgcgatcgtggctcactgcaaccttcgcctcccgggttcaagtaattctcctgcctcagcttccctagtagctgggactacaggcaccacacctggctaatttttgtatttttagtagmgacagggtttcaccatattagctaggctggtctcaaactccttgtgatctgcctgcctcagcctcccaaactgctgggattataggcgtgagccactgtgcctggcctattttattttatttttttgagacagagttttgctcttgttgcccgggctggagtgcagtggcgcgatctcggctcactgcaacctccggctgctgggtgcaagtgattctcctgcctcagcctcccgagtagctgaggttacaggtgcccaccaccacgcctggctaatttttgtgtttttggtagagatgggatttcaccacgttggccagactggtcttgaactcccaacctcaggtgatccgcccacctcagcctcccaaagtgctggggattacaggcgtgagccactgcaccgggccccatatgaatgtattcaaactggactaagctatgaagagccattgttggagtagatgtgaaccttgaggggcctcaaagcccaaggaagaggtaaggtttctgaggcagttcagacttattttagtccatcacggattgaagactnnnnnnnnnnnnnnnnnnnnnnnnnnnnnnnnnnnnnnnnnnnnnnnnnnnnnnnnnnnnnnnnnnnnnnnnnnnnnnnnnnnnnnnnnnnnnnnnnnnnnnnnnnnnnnnnnnnnnnnnnnnnnnnnnnnnnnnnnnnnnnnnnnnnnnnnnnnnnnnnnnnnnnnnnnnnnnnnnnnaaatgtaatagattgttgttttggagtaacctttgtccatggtaccatcttatgttctaataataaaataataaaaataataactcatgtagtgaagaattgctgtgcatcaggcactatgctaagctccagtaggaggaaatacagaggagccaggcgcagtggctcacacctgtaatcccagttttgggaggctgaggatcacgaggtcaggagatcgagaccatcctggctaacacggcgaaaccccgtctctactaaaaatacaaaaaaattagccgggcgtggtggtgggtgcctgtagtcccagctacttgggaggctgaggcaggagaatggtgtgaatccaggaggtggagcttacagtgagccgagatcgcaccattgcactccagcctgggcgacagagtgagactccatctcaaaaaaaaaaaaagaaaaagaaaaagagggagatacagaggagataccagtgaacaatttgattttataccagcaaaaatgtccagggtctgtttaagggagggctggctttcctttattgttacttatttttttttttttacaatgcagctatatttaaaagcgtttagaagtaaatgcttgtttacagacctcatacaccccaagagcattagagtattttcttttttcattattagtctcatcagagtcccagaaattgggaacactcagatatcctcatggctgcatgtttttcagaaatactttaattaatttctttattgcttcttactaagtcttttacttggagctaattaagaatcttttgtctcttttagaagtttctccatttctctttattacgaaggctcaacttttgtgtcttatgtgcagcatcttgaagttaagtcttcattattttgtacaagtttttggtattttatggtttagtttctttttcttttttttttttttgagatggagttttgcccttgttgcccaggccggagtgcagtggcatggtcttggctcactgcaacctccacctcccaggttcaagcgattctcctgtctcagccttccgagtagctgggattacaggcacgtgtcaccacacctggctaattttttttgtatttttagtagaggcggggtttcatcatgttggtcaggctggtctcaaactactgacctcaggtgatccacccacctcggcctcccaaagtgctgggattacaggtatgagccacctcgttcggcaggtttagtttctttcagattttgaaagaaaatcgtactatgatcaaccagaattacgtgtctgttaccattactacactataaccacttgtatttttagtagagatggggtttcaccgtgatagccaggatggtctcgatctcctgacctggtgatccgcctgcctcggcctcccaaaatgctgggattacaggcatgagccacctctttcggccggtttagtttctttcagattttgaaagaaaatcatactatgatcagccagaattatgtgtcttaccattactacactatagccactgtgtagaaaaagatgatttttttttttttgagacggagtcttgctctgtcgcccaggctggagtgcagtggcacgatcttggctcactgcaagctccacctcccagattcacaccattctcctgcctcagcctcccgagtagctgggactacaggcgcccaacaccacacccggctaatttttttgtatttttagtagagacggggtttcaccgtgatagccaggatggtctcgatctcctgatctggtgatctgcctgcctcggaaagtgctgggattacaggcgtgagccttagattaataccacttgtggaaaattcagaagagtgtttaacagaagaaacttaattactctgtggttccatcatctaggcataactactgttagcattcctttttatcattttttgaggtggagtctcactctttccccaggctgaagtgcagtggcgcagtctcagctcactacaacctccgcctcccggattcaagcaattctcctgcctcagcctctagagtagctgggattacgggtggctgccaccatgccctgttagtttttgtatttttagtggagatggggtttcaccatgttggccaggctggtctcacaatcttggctggatgtgatggctcacgcctgtaatcctagcactttgggagaccgatgctgtggatcgcttgaggtcaggagnnnnnnnnnnnnnnnnnnnnnnnnnnnnnnnnnnnnnnnnnnnnnnnnnnnnnnnnnnnnnnnnnnnnnnnnnnnnnnnnnnnnnnnnnnnnnnnnnnnnnnnnnnnnnnnnnnnnnnnnnnnnnnnnnnnnnnnnnnnnnnnnnnnnnnnnnnnnnnnnnnnnnnnnnnnnnnnnnnnnnnnnnnnnnnnnnnnnnnnnnnnnnnnnnnnnnnnnnnnnnnnnnnnnnnnnnnnnnnnnnnnnnnnnnnnnnnnnnnnnnnnnnnnnnnnnnnnnnnnnnnnnnnnnnnnnnnnnnnnnnnnnnnnnnnnnnnnnnnnnnnnnnnnnnnnnnnnnnnnnnnnnnnnnnnnnnnnnnnnnnnnnnnnnnnnnnnnnnnnnnnnnnnnnnnnnnnnnnnnnnnnnnnnnnnnnnnnnnnnnnnnnnnnnnnnnnnnnnnnnnnnnnnnnnnnnnnnnnnnnnnnnnnnnnnnnnnnnnnnnnnnnnnnnnnnnnnnnnnnnnnnnnnnnnnnnnnnnnnnnnnnnnnnnnnnnnnnnnnnnnnnnnnnnnnnnnnnnnnnnnnnnnnnnnnnnnnnnnnnnnnnnnnnnnnnnnnnnnnnnnnnnnnnnnnnnnnnnnnnnnnnnnnnnnnnnnnnnnnnnnnnnnnnnnnnnnnnattgtgcctcctgggttcaagcgattctcctgcctcagcctccccaaagagctgggactacaggtatgcagcaccacacctggctaattttttttttttgagatggagtctcactctgtcacccaagctggagtgcagtggcatgatcatagctcattgcaggctcaaactgctgggatcaagccatcctatcctcctgcctcggcctcccaagtagctgggactacaggcgagaaccaccatgccaagcttagtattgatattttctaatggttttatggaatttttcctacctcaagcttgtttgtcttttaaattattactattatttctaagagatgggatctcactgtggtgcccaggttggagtgctgtggctatccacagacaggattctactactgcagtatggaagttttgacctgccccatttccaacctggggtggttcacccctctttaggcaacctggtgattccctgctcccttgaagtcaccatattgatgctgaacttagtgtggacacccgattggcatagagcactatagcccagaactcctggactactcaagcaatcctcctgtttcagtctcttgagtagctgggactgcaggcatgcaccatcatcccaggctcccccccccccttttttttttttttttgagacagagtctcactttgtcgccaggctggagtgcaatggtgcgatcttggctcactgcaacctccgcctcccaggttcaagcgatcctcctgcctcagcctcccaagtagctgggattacaggcatgctctaccatgcccaactcattttgtatttttagtagagacgggggttctccatgttagtcaggctggtctcgaactcccgacctcaggttatccaccttccttggccccccaaagtccatagtgctaggattacaggcgtgagtcaccacacctggcctttttttctttttttttttttttgagacgcagtcttgctctgtcgcccaggctggagtgcagtggtgtggtctcggctcactgcaagctctgcctcccaggtttacgccagtctcctgcctcagcctcccgagtagctgggactacaggcgcctgccaccacgccagggtaattttttgtatttttagtagagacagggtttcaccgtgttagccagggtggtctcgatctcccgacctcgtgatccacccacctcagcctcccaaagtgctgggattacaggcgtgagccaccgtgcccggctttttttytctttttttttaaatggaaggcttaaagaatggattttgatggtttatagcaagtaactttttgaagcttttattttttctgacagctgaatatctagcttatttgcctttttgctcaggaaataaatgtatatttggactagagtttcttatagtaactttttaaaggtactattctagaaatactggctggtaggatttatttggagatgacataggcagcagaattgttttaatcatatctttggaaccttgattgacaaaaaatatgttctggactttggtatgaaatgtattctaaaactaaaatattgattaaatagaagttatattcacttagctaaatgtttgtcaaaaatagaggacaccttgctgggcgcagtggctcatgcctgtaatcctagcactttgggaggttgggcagatcgcttgaggtgaggagtttgagaccaggctggccaacatagcaaaactccatctccactgaaaatacaaaaattagccgggtatgggggcaggtgccttgtaattccagcactttgggaggccaaggccagcagattacaaggtcaggagttcgagaccagcttagccaacacggtgataccctgtctctactaaaaatacaaaaattagctgggcatggtggcgtatgcctgtaatcccagctactttggagactgaggcaggagaatggctgggacccgggagacagaggttgcagtgagtagagatgacgccactgcactccaacctgggctacagagcaagactctgtctcaaaaaaaaaaaaaatagaaggcttcggccaggcatggtggctcacgcctgtaatcccagcagtttgggaggccgaggtgggcagatctcttgagcccaggagtttgagaacagcgtgggcaacatggcaaaaccctgtctctctaacaaatactgtaattagctgggcgtgatggtacacgcctgtagtcccagccgcttgggcggctcaggtgagaggaacaattgatcccaggaggttgaggttgcagtgaaccaagatcttaccactgcactccatcctgggtgatagaataagaccttgtctaaagaaaccaacaacaaaaaatcaggggtgtggaactttaatttcctgatcttacatagtgagaactccatagatactctgaaatttttttttttttttttttaagatggagtctcactctgttgcctaggctggagggcagtggtgcagtctcggctcactacaacctccatctcctgggttcaagtgattctcctgtctcagcctcctgagtagctgggattacaggaatgtgccatcatgcccggctaatttttatatttttagtaaaggcagggtttcaccatgttggccaggctggtctcgatctcctgccctcaggcgatccacccagctcagcctcccaaagtgctgggattagaggcctgagccaccgcacctggccaatactctaaaattaatgagtctgcaagtagaggcttaaaggtatgaaagtaatcataacaaaactaagaataaaaatgtgattggcagggtttggtgagaggagggtgatttttagttttttatttataatttttttaggcttttttttttttttttttttttttttttgagatggagtttcgttcttgttgcccagcctggagtgcaatggcatgatgaagaactagaggtcaaagcatacttagctgtttttactttttattttatatctttttatactattataatggtttttcttagttgagtttcatatccctgtccccaaccccccaagaaacctccaaaaacaaaacaaaaactaggtggaattctatactgaatactgaagaaagcttgtttctaggaagaaaagaagaaaagtcggtgaaattatcctttacacttaatatcagagttgaggtgaggcttaagctgccccttctgagtttctgaaacttgaaatacaagagtgaggagaaatagggttactaggaggatcatagagactggctttactgggcaatagtcacgaaggtttttcagttctgtaaactttgtttgaggtgtttcttttttcttgtttttttttaaattattttttgttgttgtttttgttttgtttgatattgaattcccatctactccgttgggaagcagtgtttctttgtattggtgtttagtcatttgttttttcccagacttcagacaaaacaggtttttgctgcatgtaaaaacgctttacttttgtaccttaaaaaaaaaattgctttttatagtagctttgaaaatttaatcagtctcagtatattatgtgaatgcaactgacagttgaagaaaatacatttcaggaaatgtaaattccagctgacctctgctgctcttttataatggagatgaaaaactgaaattatgtaccagcatggtagaggacctgttaatggctgctcatataatctctcctttgtccccttttgagcagaagggtatatgtgattagatattagagtttcataactttctaatgttaccggatctctattatgaaagatgccttttttttttttttttgagatagagtctcagtctggcgcccaggctggagcgcagtggcacgatctcggctcaccgcaacctctgcctcctgggctcaagcaattctcctgcctcggcctcccgagtagctggtattacaggtgcctgacaccatgcctggctaatttttgtatttttagtagagacagggtttcgccttgttggccaggctggtctcaaactcctgacctcaggtgatctgcctgcctttgcctcccaaagtgctgggattacaggcgtgagccaccgcactgggctgaaagatgccttcttaaggaaatcgctactgtgctattaacaaaggggaactttgatacattctgtgcaagtgtggcaaatgagtgctctcggatcacctaagccaagtagccttctctgaatctgtagttaggcaaagtgtgcttggcctgatgctctctttatgtgtgatgtggacatcgttgaccacttaattattattattttattatagtattttattataattgttataatatttaattattataattataatatttttatatttatgtaaaaattatatttatattacataattgtaattattataatattttattataattatttattttattttatttatttatttcttttaacagatgaaagtctctctaggtttcccagcccaaagacctggtctcaagcaatcctccacctcagcctcctgagtagctgagactacatgtgtgcaccactgtgaccagctgataacttaatttttttgtttgtttgtttgtttgtttkttttagacagagttacgctctgtcgcctaggctggagtgcattcgagtgatctcgggtcactgcagcctcgatctctgggctcaagcaatccttctaccttagcctccgtagtagctgggactacaggtgcataccaccatacccagttaatttttatatattttttgtagagatggnnnnnnnnnnnnnnnnnnnnnnnnnnnnnnnnnnnnnnnnnnnnnnnnnnnnnnnnnnnnnnnnnnnnnnnnnnnnnnnnnnnnnnnnnnnnnnnnnnnnnnnnnnnnnnnnnnnnnnnnnnnnnnnnnnnnnnnnnnnnnnnnnnnnnnnnnnnnnnnnnnnnnnnnnnnnnnnnnnnnnnnnnnnnnnnnnnnnnnnnnnnnnnnnnnnnnnnnnnnnnnnnnnnnnnnnnnnnnnnnnnnnnnnnnnnnnnnntaaattagctgggcatggtggtgggcacctgtagtcccagctactcgggaggctgaggcaggaaaatcacttgaacctgggaggctgcagtgagccgagatcgtgccactgcactccagcctgggcgacagagggagactccaactcaaaaaaaaaaaaaaaaaaaaaggacaggtgtggtggctcacgcctgtaatctcagcactttgggaggctgaggcaggcggatcacgaggtcaggagatcgagaccatcctggctaagatggggaaacctcgtctctactaaaaatacaaaaaaattagctgggcgtggtggtgggcgcctgtagtcccagctactcgggaggctgaggcaggagaatggtgtgaacccaggaggtggagcttgcagtgagccaagatcaagccactgcactccagcctgggcaacagaatgagactccatctcaaaaaaaaaaaaaaaaaaaaaaaaaagggaaccataattcttcgttttccacattgaatttcaaatgcagcaggtatatatgaagcaactaccatgggtgagctattcggagagaaccaggacatagtcttgtctaccaagaacttagagcctaggtagaagaaaggagacgtttacccacatattttatatctgtaacataaggtagagcatctggtcagtctagtgtatctatcctgattgctcaagggaacaaatcacctttccagacattcagaattgtctgataatcctttttggcaaaaacgttcgcttgttttctgttactctttcatcctgctgctacttttgttctggaggtcgggctgttgaagggaggatggtacaaaggtagcagcgacaggggtcagcagtccacagattgcacacttttccctcagatgatgagagttaactgtacgtctgcaggttaattcttaaggtaattaaatacctgatgaaaacttgtagaatttatttctgaattttagtagtgacctggatatttaaagcactatttaccttttttccagaattattttaatagtattagttacatttctgtagtgctatctatgtgctagatgattttctaaatgccttatttaatccttatgtcaactgtgaggtaagtactattgtgtccccatttactcacaagaaaactaaggttaattgacttttctagagttacataataaaggagacataaagttgggatttgaacccaggcagcctggctccagagtccatgcttttaaccagtagtaagctgtgttgcaaaagaatgtgagcaccacatggcaaaataggatttttggtttttctgatgggagatgaagaacatatcctctgcctcttgtgtcttgccacaactaggtggcatacctatctctgctgtaggaaatacttggaaataaaacatatccataggaatccctgcccctagcttcctccttgcttggtgtcctctctgtgatggtcacagagcagttttgcatgtgacatttactgtccagtgcttggctctgcagagaagatgggattgacctagtgctgggtaggaagtgtgttttcagcctgtttcatccagtattgtgaagcatgtgtttgtttttttgttttcagtgtgatagttttatttaagaaatgttaatagaaataattttcaaacatccattaattgaaaaaataaggtggtataataaaactttattttttgattctatatgtatacagctgccctgaatatattccactcttrtgcaagggtaattgcttctgggcatttcctgctaaaaacagtaacataattttgacttctgtttatttctaggaaccctaaggactctgcaatatgaataattccctagagaacaccatctcctttgaagagtacatccgagtaaaggcacggtctgtcccgcaacacaggatgaaggaatttctggactcactggcctctaaggggccagaagcccttcaggagttccagcagacagccaccactaccatggtgtaccaacagggtgggaactgcatatacacagacagcactgaagtggctgggtctttgcttgaacttgcctgtccagtcaccaccagtgttcagccacaaacccagcaagaacagcagatccaggttcagcagccgcagcaggttcaggtatatgggaaatgctgaggtgcagcctgtttaatgtactttatttgttgtcagtgttttagttagtgggctcatcacatctatgtggatgttataggttatttaacactaagattttcaaagttaatgtggactaaaagttttttctttcttctcctttttctttaagctttttttttttttaaacaaaccccagtgtcaaggactgactttgaatagattgcagccagggatctgcttagctacctaggaaaccccaacccagaagcgggtcatctatgattggtttagcatcaggttcaacgtgacttgcgtgatgagtgagggggcgccacctttctggcagcaccttttcccaggatgaggggctctccacaccggaacccggtcccggcacgtgaccccgccggcggcgatgtcagtgatgktgggggactggctttccgaggctgaccaacactgtggtgctgccrtgtcattgtacttgggttgttttctttgtttgtttcttctttttttgagatggagtcttgcactgtggtccaggatggattctcctgccccagcctcctgagtagctgggattccaggtgcctgccaacacactcggctaattttttatacttttaatagagacggggtttcactatgttggccaggctggtcttgaactcctgacctcatgatccacctgcctccttatccaaaagtgctgggattacaggcatgagccaccgcacccggccacacctgggttgtttttttcttttcttttttgagacagagtctcattctgtcacccaggctggagtgcagtggtgcattcttgcctctgtcccccgggttcaagctattctcatgcctcagactcctgagtagctgggactacaggtgtgcactaccaccctcagcaatttttgttgtatttttaatacagactgggtttccccatgttgggcttgaactccagacctcaagagatctgcgtgccttggcctcccaaagtgccaaagtgctgggattactggtgtgagccaccatgcccagccttttttktgtttgtttgttttttctttgagttggagtttcgctcttgttgtccaggctagaatgcaatggagccatctcggctcactgcaacctgcacctcttgggttcaagcgattctcctacctcagcttcctgagtagctgggattgcaagcatgtgctaccacgcccggctaatttttgtatttttagtagagactgggtttcaccttgttggccaggctggtctcgaacttctgacctcaggtaatctgcccttctcgggctcccaaagtgctaggattacaggcatgagccacggcgcctgactttttttttttttttttttgagggacagggtcttgctctgtcacctaggctggagtgcagtggcacgatcactcctcactgcagctttgacctccaaggcttaagcgatcatccagcctcaacctccaagtagctgggaccacaggcatgtaccaccacgtgcagctaattaattaattttttttttttttgtagagatatagtctccctatgttgcccaggctggtcttgaactcttggcctcaagatattctcctgccttggcctcccaaagagctgagattacaaatatgagctgccatgcctggccttaaaaatattttcgagtactgtaaactaaaaacaccacagatatttggtcttttttatttaagatggagtctcgctctgttgcccaggctggactgcagtggtgcaatctcagctcactgcaagctctgcctcccaggttcacgccattctcctgcctcagcctcccaggtagctgggactacaggcagctgccaccacgcccagctaatttttttgtgtttttagtagagacggggtttcaccatgttagccaggatggtctcgatctcctgacctcgtgatccacctgcctcggcctcccaaagtgctgggattacaggcatgagccactgcgcctggcccaaatatttgatctttgctgtggagagctgaatagttttgaaattagagatcttttggtactgggtttaggtgtgatagcttcatatgactgaggcttcctttcttttcttttgtattttttcctgagatggagtctcgctctgtcccccaggctggagtgcagtggtgtgaccttggctctctgcaagctccgcctcccgggttcacgccattctcctgcctcagcctcccgagtagctgggactacaggcgccagccaccatgcctggctaattttttgtattttaagtagagacggggtttcaccatgttagccagcatggtctcgatctcctgacctcatgatccgcccacctcggcctcccaaaatgctgggattacaggtgtgagccaccacgtccatctgaggcttcctttctatttgtgtcatcctgaatagagacagaacacaggagggctggtcttggctgattactgatagtgtaacatttgaaattaatttaaaaatggaaaggctgatgtatttcagtgatcttcattaacttgtgtgattccataactcagattacgtatggatttnnnnnnnnnnnnnnnnnnnntgcatttgtgaatgcctgtaatcccagcactttgggatgccaaggtggacggatcattgagtccagaagtttgaggccagcctgggcaacatggcaaaaccccgtctctccaaaaaataaaaaaaaattacccagggatggtatgtacttgtagtcccagctatttgggaagctgaggtgggaggattgcttgagcccaggaggttaaaaccagcctgggcaacatggtgaaaccctgtttctaccaaaaataagaaaaaattagctgggtgtggtgatgcacgcctatggtcttagctactagggaggccgagatgggagaatcgcttgagcctgggaggtggaggttacagtgagctgagatcgtgccactgcactccagcctgggtgacagagtgagatcccatctcaaaaaaaataaaaataaaaattgtaaggcacaaaaaaataatgctaattgatgataaactttctgaaagacgagaaactagtacatttgttgagaaggtaaaatgttttcctttttttttttttcgagatggagtcccactgtgtcacccaggctggagagcagtggcgtgatctcagctcactgcaacctctgcctcctgggttcaagcgattctcctgcctcaacctcctgagtaggtgggattccaggcacctgccactgtgccggctaatttttgtatttttagtagagacagggtttcaccatgttggtcaggctggtcttgaacttctgatctcaggtgatccaccggccttggcctccaaagtacaggtgtgatccaccgtgcctggccaaagttttcctctttagaggtctttatgtgagataacaggctcctctagttgcaaatgcagttttcttgccattgtctattatggtttaatttcattgtattctggaagtctttttatactaagaggataggaaagggactgaaacatgctggagaggcaggagtatggagaggtgtgcctggtgagatagaaggtttccctttccttcattttttctgttttttttttaagagacaggatttcacttgcccaggctggagtgctgtgacatgatcatggctcactgcagcctctacctcctgggctcaggtgatgctctcacctcagcctcccgagtagctaggactacaggtgcgtgccaccatgcccagctaattttttcatttttggtagagatggactctcgccatgttgctcaggctggtgttgaactcctggcctccagcagtcctcatggctcagcctcccaaagtgctgggattataggcatgagccactgttcccagctgaagtaggtttcactgtagctcctcaaaaatgcagacgagtatattggaaggacatagcctctgaagcttcagtactgggtttaaatttgacttgaccactcaattgttggcatgagcttattaatctttacctccagtttgttcatcagttaaataaggataataccatttaatgagactgaataagataataaagtatctggcatatggagagtttttttttttttgtaatggagacagggtctcattctgtcacctaggttggagtgcagtggtatgatcttggctcactgcaaccccagcctcccaggctcaagcaatcctcccacctcagcctcccgagtacatgggaccacaggcgcacaccaccaacacctgcctaattttttgtatttttgatagagccagaatttcaccatgttgcccaggctgagatttactcattttttatctttatatttatttacttactttttgagacagagcctcactctgttgcccagactagagtgcagtggcattattttggctcactgcaacctccatctctggggttcaagctagcacgcccgactaatttttatatttttagtagagawggggtttyaccatgttggctagggtggtcttgaactcctgactttaagtgatctgccaacctcggcctcccaaagtgctgggattgtaggcatgagccaccacgcccagccttgttttgtctttgtaaggaagaaaaggtacaggaaaggttaagtaaaagaaggctggcccaggcatggtggctcacacctgtaatcccagcactttgggaggctgaggtgagtggattccttgagcctaggagtttgagaccagcctgggcaacatggcgaaatcctgtctgtacaaaagtacaaaaattaactgggtatggtggcttgcttgtgtgatcccaggtactggggaggctgaagtgggaggatcacctgaacctgggaggtcatggttgcagcgagctgtgattgtgccactgcactctagccttttacactaaggacaggaaaggtgtctcaaaaaaagagaaaagaagtctgattttctggctcaaattattctgctgttttttacagctttgacctcctcttccttaccacgcctggccaatttttgtacttttttcagtagaggtggggtttcattcaccatgttggacagactggtcttgaactcctgaccttaaacgattcacttgcctcagcctcccaaagtgcaggcatgagccattgcacctggcccctaggctggtcttgggactcctgagttcagctgagccacccactttgtgggtgtttggattacaaatacaaagtgtttggattacaggcacaagccattacacctggccccgctttctcataagattaaagagtttggggctgggtgcggtggttcatgcctgtaatcccagcactttgggaggccgatcaggagattgagaccatcctggctaacacagtgaaactccgtctctactaaaaatacaaaaaattagccaggcctggtggcgggtgcctgtagtcccagctactcgggaggctgaggcaggagaatgacgtgaacccgggaggtggagcttgcagagagccagggtcacaccactgcactccagcctgggcgatagagcaagagtctgtctcaaaaaaaaaaaaagtttggggatttaagtttggagtgttttttgagactttatgttcaagataaactgatgaatgcttgaacttgggaggtagaggttgcagtgaatcaagatcacaccactgcaccacagcctgggtgacagagcagactctgtctcagaagaaagaaaagccactgaccgagatcactattaacgttcgtctttctccctaaactctatgtaaatgaaagaagaaacaaatataatgacatccatgagatagattcagtgtgatagaatcataagaatgtatgttttccctaagtgactaaaaagatacttttaaaaaataaagaattctggccaggccaggcatggtggctcacacttgtaatcccagctgtttgggaagctgaagtatgtagatgacttgagcccaggagtttgagaccaggctgggaaacatggtaaaacctcatctctacagaaaaacacaaaaattagtttggcatggtggtgtgcacttgtagtcccagctactcagaaggctgaggaactccttgggcccaggagttcgaagttgcagtgagctgtgatcacgccactgcactccatcctgggcaaaagtgcaagaccctgtctctataaaaaacagaacaacaaagcatttttaagagtgttggaaaaaatgaataccatttaaaaaccactaaatctaagaaattgataaaagagaataagtagacagaattaggtgatgaaaggccaggcgtggtggctcatgcttgtaatcccagcaccttgggaggctgaggcaggcggatcacctgaggtcaggagtttgagaccagcctggccaacatggtgaaacctcatctctgctaaaaaatacaaaaatcagccgggcatgttggcaggtgcctatagtcccagctattcggaggctaaggcaggagaattgcttgaacctgggaagccaaggttgcagtgagctgagatcgtaccattgcactccagactgggcaatgtgagcgaaactctgtctccaaaaaaaaaaaaaaatttggtgacaaatgcgtgtaggaaagaacttttggggaaagtggggcagttcttagagtgccctaagctgagaagtagaggatacacagagtagaggtccactgggggtagctttagaactaaaggttgggaattgactagagacttcaaaacacacacatacacatatgtatacttacagctcacattaccttgatgagcaagttagagatacattagtttgatgataattgttactgctcttttgagtaagaatcataggctgggtgcagtggctcatacctgtaatctcagtactttgggaggctgaggcaggaggatcctttgagttcaggaattcaagaccagcctgggcaacatagtgagactttgtctgtactaaaaataaaattagccagatgtagtggtacacacctgtaatcccagctactgaagaggctgaggtggaaggatcgcttgagaatactttatctcaaaaaaaaaaaaaaaaaaaaaaattcccccccatggatctgtattttcgccagccttttagagtgctctttgtggtcccctcgcccacacagattatcaactattaatgcaagttataagtgtaattggaggaaacgtcctttttttctgtaaaaaataattttcagctgtgtgtggtggctcatgcctctaatcccagcactttgggaggacaaggcgggtggatcacgaggtcaggagttcaagatcagcctggccaagatggtgaaaccccgtctctactaaaaatacaaaaaagtagccaggtgtggtggtgggcacctgtaatcccagctactcgggaggctgaggcagagaattgcttgaacccgggaggcggaggttgctgtgagccaagattgcgccactgcactccagcctgggcgacagaacaagactatctcaaaaaaaaaaaaaaaaaaaaataataataataataataaattttctacttgaggcttttttgccttattcaagtagttctaaaagtcttatcacaaatttctaacctacaggatgctagagagatggtttgtgctatatgatacctgcaagagtagttttattcctttctactttaaattttagccaagtttggccgggtgtggttgctcatgcctgtaatcccagcattttgggaggccaaggtgagtggattgcttgagctcaggagttctagaccagcctaggcaacatggcaaaactcccatctctaccaaaaatacaaaaaattggccaggcatggtggtgcatgannnnnnnnnnnnnnnnnnnnnnnnnnnnnnnnnnnnnnnnnnnnnnnnnnnnnnnnnnnnnnnnnnnnnnnnnnnnnnnnnnnnnnnnnnnnnnnnnnnnnnnnnnnnnnnnnnnnnnnnnnnnnnnnnnnnnnnnnnnnnnnnnnnnnnnnnnnnnnnnnnnnnnnnnnnnnnnnnnnnnnnnnnnnnnnnnnnnnnnnnnnnnnnnnnnnnnnnnnnnnnnnnnnnnnnnnnnnnnnnnnnnnnnnnnnnnnnnnnnnnnnnnnnnnnnnnnnnnnnnnnnnnnnnnnnnnnnnnnnnnnnnnnnnnnnnnnnnnnnnnnnnnnnnnnnnnnnnnnnnnnnnnnnnnnnnnnnnnnnnnnnnnnnnnnnnnnnnnnnnnnnnnnnnnnnnnnnnnnnnnnnnnnnnnnnnnnnnnnnnnnnnnnnnnnnnnnnnnnnnnnnnnnnnnnnnnnnnnnnnnnnnnnnggatcctcccacctcagcctcctgagtagctgggactataggctacagagtagagtggcacaatcatagctcagtgcagccttgaactcctgggcgcaattgatcctgccatttcagcctctggagtggctgggactacaggcatgcaccaccacgcctggctaatatttttactttttgtggagagaggggtgttgctatgttgcctaggctggcctcaaactcctggcctcaagtgatcctcctgccatagcctcctgatttaggattacaggcatgagcacagcacttagcacctcatttcattttaatttcaagtaaaatgtaatacttttttttaaaaaaggtgttgagagttgttatatctgaatgaaagaattgtgggttgttttttttgtttgtttccaaatttttttttttttgagacggagtctcgctctatcgcctgggctggagtgcagtggcatgatttaggctcactgcaacctctgcctcctgggttcaagtggttctcctgcctccgccttctgagctaattttttttgtatttttaggagagacagggttttaccatgttggttggccaggatggtctcaatctcttgacctcgtgatccgcctgccttggcctcccaaagtgctgggattataggcctgagccaccgcgccyggccttttgccagattcttaatatgattatttagtaattttctacccagtgaaaaagcttggctcttatataaattaaaaaaattgaagggaagtaatataaataacatttaatttcttttttgttttttttttcgagacagagttttgctctttcacctaggctggagtgcagtggtgctatctcggctcactgcaagctccgcctcctggaatcacaccattctcctgcctcagcctcccaaggagctgggactacaggtgcccaccaccacacccagctaatttttttgtatttttagtagagacggggtttcaccatgttagccaggatggtcttgatctcctgaccttgtgatctgcctaccttggcctcccaaagtgctgggattacaggcgtgagccaccgcacccagccgttaaatttactcttaactcttattcccctaattttaaattcttactattttggatataaagtgacatcagattatttgtaattttgtttatttctggagtgacggacaggtgccaccacttaggaggtggattgggaggttctaactccctagtatttctgctaacaatagccattagccacattagccatttaattgtttattttggaagcttgagcattgataagtaatttctctctctctttttttttgagacagagtctctgtcgatgaggctggagtgcagtgccatgttctcggctcactgcaacctccgccccccaggttcaagctattgtcctacctcagcctcctgagtcgctgggattacaggtgcacaccaccacgtctgggtaatttttgtatttttattagagacggggtttaaccatgttggccaggcggtctcgaactcnnnnnnnnnnnnnnnnnnnnnnnnnnnnnnnnnnnnnnnnnnnnnnnnnnnnnnnnnnnnnnnnnnnnnnnnnnnnnnnnnnnnnnnnnnnnnnnnnnnnnnnnnnnnnnnnnnnnnnnnnnnnnnnnnnnnnnnnnnnnnnnnnnnnnnnnnnnnnnnnnnnnnnnnnnnnnnnnnnnnnnnnnnnnnnnnnnnnnnnnnnnnnnnnnnnnnnnnnnnnnnnnnnnnnnnnnnnnnnnnnnnnnnnnnnnnnnnnnnnnnnnnnnnnnnnnccagctactcaggaggctgaggcaggagaactgcttgaacccgggaggcggaggttgcagtgagccaagattgcgccactgcattccagcctaggcgacagagtgagactcttgcctcaacaaaaaaaaaaaaagaaaagtaaagtaaattaagaaatacagtaaagcatgaagcatatgagctatgattcagtgatagtaaccagatttttgacattttgttttaagcaagccgtattataatttaaaaacatactatgtgtttaacccaatagtagtggttctttttttttccttacccttatttttttctgagatggaggtctcactgtcactcatgccagagtacagtgacatgatcttgtgtcactgcaacctctgcctcttgagttcaagtagttctcccacctcagcctcctgagtcgctgggaccacagttggctcacaaccacgtctggctaatttttttgtattcttggtagagacggggtttcaccacattgcccaggctggtctcgaactcctgagctcaagcagtccaccagctttagcctcccaaagtgctgaggttacaggcatgagctaccattcctggccagaagtgattcacaaatggtagttcaagagactcgtaggggcctgtaatcccagcactttgggaggccaaggcaggcagatcatgagttcaggagatcgagaccatcctggctaacacggtgaaaccccatctctaataaaaatacaaaacaaaaattagcgggcgtggtggcgggtgcctgtagtcccagctacttgagaggctgaggcaggagaatggcgtgaacccgggaagtggagcttgcagtgagctgagatcacaccactgcactccagcctggacgacagagggagactccgtctcaaaaaaaaaaaaaagagagagactcctggtagcctccaagcaccttttagggttcctcaaggtcaaagctgtttttattacaatgccaatgtattaatttgcctttttcactttcattctctcctgaccatgtactggagttttgcagaggccatgtgtgatgtataatagcacaacagattgagtgcggaagcagataggagaattcagctaccttatattaagtcagccattaaataggtttgcaaaaatgggtcaggcgcagtggcttacgcctgtaatcctaacactttgggatgccgaggtgggcagatcactttgaggtcaggcgttcgagaacagcctggccaacatggcaaaaacctgtctctactaaaaatacaaaaattagccggacatggtggcatgcccctgttatcccagctacttgggaggctgaggcaggagaattgcttgaacccaggaggcaaaggttgcattgagctgagtgagccaagattgcctcactgtactccagcctgggcaacagagtgagactccatctccaaaaaaaaaaaaaagaggtttccaaaaatgtaaaacaatgcaattcttattataattattttggcaaatagttatttttcatgagaatatgttatttatgttaacatataatggctttatttttgtttgtttttttctagaacaactcttgctctgtcccccaggctggcatgagtgacacgatctccgctcactgcaacctctgcctcctgggttcaggctgttctcctgtctcagcctcctgattagctgggattacaggcatgcaccaccacacctggctagtttttgtatttttaggacagacagggtttcaccatcttgtccaggcgggtctcgaactcctgaccttatgtgaccctgcctgccttggcctcccaaagtgctgagattatacgcatgagccactgcatctggctttatctgatttttaattaattttttttgttttagtatagacggggtttcaccgtgttagccaggatggtctcgatctcctgaccttgtgatccacccaccttggcctcccaaagtgctgggattacaggtgtgagccactgcgcccagcatggtttacaatttttaaaattcctagttttgggccaggcgtggtggctcatgcctgtaatctcagcactttgggaggatgcggtaggtggattgcttgaggatatgagttcaagaccaggttggccaacatggggcaaccccatctctactaaaaatacaaaaacaaacaaaaaaacagccaggcatggtggtgggcacctataatcccagctactcgggaggcagaggttaagagaatcgcttgaacccgggaagacaaagttgtacttccaagatcacaccactgcactccagcctgggcgatagactgagactcttgtctccaaaaaaaaaaaaaaaaaaaaaaaattagggccagccatggtggctcacgcctataatcccagcactttgggaggccgaggcaggcggatcacctgaggttgggagtttgagaccagcctgaccaacatggagaaactccatctctactaaaaatataaaaaacaaaaaacaacaacaaaagaaaaccagccaggcatggtggcgcatgcctgtaatcccagccactcaggaggctgaggcaagagaatcgcttgaacccgggaggcagaggttgcggtgagctgagatggcaccattgcactccagccagggcaacagagtgaaactccatctcaaataaaaaaagaattaaaaaattaaattcctagttttaatttagagtacaagtaaatattactagatataacctatgtaaacaagttcttttgggtcttcaatattttttggccaaattcaagttttttggtgttagagtttcactttgttgtccaagctggagtacagtggcacgtgccgttcatagttcactgcagcctcaatctcctgggctcaagtagtcttccttcctcagcctcccaggtagctgagactacaggtgtgtgtccacgcccaggtaatttttaaaattttttgtagagataggggtgtcactatgttgcccaggttgatctcgaactcctgggctcaagcagttttcctgccttggcctcccaaagtgctgggattacaggcatgaccacgatgcccagccccaaattcaggctttgactaagaaatcttgaaaactgctgttctgcagtaattggctacatagtttcctcttatgtctttggcatatagccctagttcttaaatttgaccatgtaattacactggaggacttgataaaaccacttcttagaatttcagagttagtaggtctggagtggtacctgacaatttgtatttctgagtgcctggatgctgctgctgctgttggcatggaaactacattttgagaaccactggtgcaaggaaataatattttacttcatggagagaaataataaacctacttatttgaacacctattatctgtaactaaatattattttatgtttaaaacactgtagggaagtagacattctccccttttatacttactgtacctaaagaaactgtttagaggttaaatttccccatggattcacaggcagaaaagtgcagcatcaattcacattgaagtctgtgatctcaaaacctgagccttttttttttttgagacggagtctcgttctgtcacccaggctggagtgcagtggcgcgatcttggctcactgcaaactccgcctcccaggttcacgccattctcctgtctcagcctcccgagtagctgggactacaggcgcccgtcaccacgcctggctaattattttaatagaaatggggggtttcaccatgttagccaggatggtcttgatctcctgacctcatgatccgcctgcctcggcctcccaaagtgctgggattacaggtgtgagccacagcgcccggcctttttttaaaaaatatacttagtaacagctttattgagatataagttacccatttgaaatgtataattcaggcacactggctcacacatgtaatcccagcactttgggaggccgaggcaggcggatcatgaggnnnnnnnnnnnnnnnnnnnnnnnnnnnnnnnnnnnnnnnnnnnnnnnnnnnnnnnnnnnnnnnnnnnnnnnnnnnnnnnnnnnnnnnnnnnnnnnnnnnnnnnnnnnnnnaggttgcagtaagctgagattccaccactgggcaacagggcaagtactttacctcccaaaaaaaaaaaaaaaagcgactacaccaattttttcttgtttttttttttttctgagatggagtctcactctgtccttgactgggctgggtatagtggcgccatctcggctcactagcttccacctcccaggttcaggcaattttgctgcgtcagccttccgagtagctgggattacaagcatgtgtaaccacgcccagctaatttttgtatttttagtagagacagggtttcaccatgttggccaggctggtctggaactcctgaccttgtgtccactggcctcagcctcccaaagtgctgggattacaggtgtgagccaccgcatctggccaactacaccaatttaacatgcccaccagcagtttcaagttgtctatatccttacctatacttgttatctgtcttttttagatataacttattagatataaagtggtttctcattgtggctttgattggaatttccttcacagctagtatgatatggagcaactttttatgtggttcttggccatttgcatatattcttttttttgggagatagtttcactcttgttgcccatgctgtggtgcagtggtgcaatctcggctcactgcaacccccacctcctgggtttagtagttcacctgcctcaacctcccaagtagctgggattacaggcatgcaccaccatgcctggctagttttgtatttttagtagagacggggtttcaccatgtcggtcaggctggtctcaaactcctgacctcaggtgatccacccaccttggcctcccacagagctgggattacaggcatgagcaactgtgcctggcctcattttctgccttcttgttttctacctttctaattcctacttgtggttagggtaatttatctatgtgtctgatggtaaaagctgttttttaaaagttgcatactatgtatttttttcttttcatgctcttttgcatgctgacataataataagacagtaactgtattgttatcagaaacatgtcatccaggttatggtaatattgctcagattaaattattgggattctgtttatttaaatgcctttcccattaaacatatgttaagtaagcactctaaagcagtggtccccaacgttttttgcaccagggactcgttttgtggaagacagttttccacagacattgatgggggtggtgctttgggatgaaactgtttcacctcacatcattaggtgttagatttttttttttttttttttttttttttttaagatggaggctcactctgtcacccaggctgtgatgcagtggtgctctctctgctcacttcaacttccgcctcctgggttcaagctattctgcctcagcctctcaggtaattgggattacaggcatgcaccaccatgcctggataattttttatatttttagtagaagtagagggggggtttcaccatgttggccaggctggtcttgaactcctggcctcaagtgatctgccctcctcagcctcccaaannnnnnnnnnnnnnnnnnnnnnnnnnnnnnnnnnnnnnnnnnnnnnnnnnnnnnnnnnnnnnnnnnnnnnnnnnnnnnnnnnnnnnnnnnnnnnnnnnnnnnnnnnnnnnnnnnnnnnnnnnnnnnnnnnnnnnnnnnnnnnnnnnnnnnnnnnnnnnnnnnnnnnnnnnnnnnnnnnnnnnnnnnnnnnnnnnnnnnnnnnnnnnnnnnnnnnnnnnnnnnnnnnnnnnnnnnnnnnnnnnnnnnnnnnnnnnnnnnnnnnnnnnnnnnnnnnnnnnnnnnnnnnnnnnnnnnnnnnnnnnnnnnnnnnnnnnnnnnnnnnnnnnnnnnnnnnnnnnnnnnnnnnnnnnnnnnnnnnnnnnnnnnnnnnnnnnnnnnnnnnnnnnnnnnnnnnnnnnnnnnnnnnnnnnnnnnnnnncccgtctctactaaaaatacaaaaattagggctgggtgtggtggctcacacctgtaatcccagcactttgggaggccaaggcaggcagatcacgaggtcaggagatcaagaccatcctggctaacacggtgaaaccctgtctctaataacaatacaaaaaattagccagtcatggtggcgggtgcctgtggtcccagctacttgggaggctgaggcaggagaatggcatgaacctgggaggcggagcttgcagtgagctgagatcacaccactgcactccagcctgggcgacagagcgagacttggtctcaaaaacatatatatgtatatataaattaggtctgggcgtggtggctcacgcctgtaatcccarcactttgggaggccgaggtgggcggatcatgaggtcaggagatcaagaccatcctggctaacacggtgaaaccctgtctctactaaaaataaaaaaatcagccgggcgtggtggcacgcacctgtagtcccagctactcgggaggctgacacaggagaatcgcttgaaccggggaagtggaggttgtagtgagccgagatcgcaccactgcactctagcctgggcgatagagcgagactccgtctcaaaaaaaaaaaaaaaaagttagctggatgtgatggcaggcacatgtaatcccagctacttgggaggctaaggcaggagaatagcttgaatccgggatgcagaggttacggtgagccgtgactaccatatcactccagcctggggaacgagcgaaactccatctcagaaaataaataaataaggctaggcatggtggctcaagcctgtaatcccagcactttgggaggccaaggtgagcggatcacaaggtcaagagatcgagaccatcctggccaaccaacatggtgaaacctcgtctctactaaaaatacagaaattagctgggggtggtggcatgcgtctgtagtcccagctactcaggaggctgaggcaggagaatagcttgaacccaggaggcggaggttgcagtgagctgagatcatactactgcactccagcctggtaacagcgagactctgtctaaaaaaaaaaaaaaaaaattagctggktgtggtggtggtgttcctgtagttctagctatttagcaggctgaggtgggaggatcacttgaggagtttgaagtttaaagtgccctatcatcttatcacggtactctaacctgggcaacagagcaagaccctatctttagagaaaaaaacggtcccttgtgatggctcacgcctgtaatcccagcactttgggaggccaaggcgggcggatcacgaggtcaggagatggagaccatcctggctaacatggtgaaattccatctctactaaaaatacaaaaaaaaaattagccgggtgtggtggcaggcacctgtagtcccagctacccgggaggctgaggcaggagaatggcgtgaacccgggaggcggagcttgcagtgagctgagatggcaccactgcactccagcctgggcgacaaagcgagactccgtctcaaaaaaaaaaaaaaaaaagagtgaaactccatttcaaaaacaatttttaaaatgctggccgtggtggctcacgcctgtaatctcaacagttttggaggccaaggtgggcggatcacttgaggtcgggagttcgagaccagcctgaccaacatggagaaatcctgtctctactaaaaatgcaaaatcagctgggcatggtgatgcattcctgtaatcctagctactcaggaggctgaggcaagagaattgcttgaacccaggaggttgaggttgcagtgagccaagatcatgccactgcactccagcctgggcaacaagagcaaaactccgcctcaaagaaaatggaaataaaaatgccggccgtttcggctcacacctgtaatcccagcactttgggaggccgaggtgggtggaccagttgaggtcaggagttcaagattagcttggccaacatggtgaaacctcgtctctactaaaaatacaaaaattagctgggtatggtggcacatgtctataatcccagatactcgggaggctggcttcaagaattgcttgagcctgagaggtggagattgcagtgagctgagatggcaccactgcattccagcctgggcgacacaatgagaatttggggaaaaaaaaaaagaaccaaagttttgatatttccttgttagactccagcatgtctgtaatcccagctactctaggaagctgaggcaggagaatcgcttgatcccagcaggcggaggttgcagtgagctgagattgcgccactgcattccagcctgggcgacagagcgagtccatcttaaaaaaaaaaaatttttttttttggtatttcctttttaggccccagttaattgtcttgcttgctctctggggtggatatatgtccctgttattgtaatgtgctgctggacaatcctggatctagtcttacgtattgtgtccttctcagaagccttgagtatgccagtgttttctcacattttgcaggtcccctgtctgggatctcttttctttctttccttgggtactggattttcagtgctgcctggttcactcactgatgaatcttgttgcttacaggtccaggtgcaggtacagcagtctccgcaacaggtctcggctcagctctccccacaactcaccgttcaccagcctactgagcaacccatccaggtccaggtgcagatccaaggccaggcaccacagtcagcagccccctccattcagaccccgtctctgcagagtcccagtccctcgcagctgcaagcagctcagatccaggtgcagcacgtgcaagcagcccagcagatccaggctgcagaaatcccggaggagcacatcccacatcagcaaatccaggctcagctggtggctggccagtctcttgctggtggtcagcagatccaaatccagaccgtgggtgccctttccccaccaccatcccagcagggctcaccccgggaaggggagcggcgggttggcacggccagtgtcctccaaccagtgaagaagcgcaaagtggacatgcccatcactgtgtcctacgccatctcagggcagccggtggccaccgtgctggccattccacagggccagcagcagagttatgtgtctttgaggccagacttactgacagtagacagtgcccacctgtacagtgccactgggaccattactagccctacaggagaaacctggaccatccctgtttattctgcccagccccggggggaccctcagcagcagagcattacccacattgccattccccaggaagcctacaacgcagttcacgtcagtggctcacccacagccctggcagctgttaagctggaggatgacaaggagaagatggtgggcaccacatctgtagtgaaaaactcccatgaagaggtagtgcagacccttgcaaactctctctttccagcacagttcatgaatggcaacatccacattccagtggctgtgcaggctgtggcaggcacgtaccagaatacggctcaaactgtccatatatgggacccccaacagcagccgcagcagcaaactccccaggaacagacaccaccaccacagcagcagcagcagcaactccaagttacttgttcagtaagtgaagacttatcagtagggcaggcagcctggtccctcagggcccagtgcagcacagagcttgcctcgcaacctctggcttatttactgctgttactcttacagtgatgcagtatttagtatttgggagaagagggggagaaacatcacgtgaggctatgcaacagaaaaaagagtttatcctggtacctggaggtaaatgagatggccaggaattgctttggagttttggagacattttgggtttaagtaccatggacacttctttgtaatctcttctcaggaagagtaaagttacaggtgtagatgaatgggacacctcaagtgtgtcccagtgctgtttccttgtatcataagtaaatggttttagcaaaacacttgtagtttatcacatagattacaaactcatcactggagaggctgtgagattgttcattctgtttttcatctttgggcacacagtgtgggtgaattagaaaagctaaaataactcataaggagcctgttaaaagtgatcaccattgggaggcttgaatatgccgtctatgtggtgggacctcccaagagtttttgtgttacgggggcggccgggcgaggtggtgcacttctgtaatcccagcactttgggaggccgaggcaggcggatcacaaggtcaggagtttgagaccagcctggccaatatgatgaaaccacgtctctactaaaaatacaaaaattagctgggcatggtggcaggtacctgtaatcccagctactcgggaggctgaggcaggagaatcacttgaacccaggaggcagaggttgcagtgagctgagattgcgccattgcattccagcctggacaacaggagcaaaactctgtcaaaagaaaaaagtaggggccaggcacggtggctcatgcatgttaccccagcactttgggaggccaaggcgggtgagtcaccagaggtcaggagtttgagatcagcttggccaacatggtgaaaccccgtctctactaaaaatacaaaaattagccgggtgtggtggcacacacctataatcccaggtaatcctactcaggaggctgaagcaggagaattgcttgaacctgggaagcagaggttgcagtgagctgagatcgtgccactgcactccaacctggggcaacatagcaagactttgtctcaaaacaaacaaacaaaaaaactattagtgctgggtgcagtggcagttgcctgtaatcccagcagtctgggaggctgaggtgggaggaatgcttgagcccaggagtttgagatcagcctgggcaatataggaagaccctatctctacaaaaatttaaaaaatatagtctagtgtgatggcacatacctgtggtcccagcgtagatgcgagggttgcatgagcctgggaggttgaggctactatgatcatgccattgcatttcagcctagagaacagagtgagaccctgtctaaaagaactgattggtaaaatatctggtcccgttagagtgggatatagggcctctggtcttatgggactgatgaaggtgctatgcctcggtgggcataggctcctgagcatgcatatgtttgtgggagctggtacaaacaagttagataagggactgcacttggaaacatgggctgtaagtgattaattaagcaaaggttgaccaggtggtttcatagaggcagtatcatattatcctaggtgacattgttaaggacctgctaaatatctagctgttgggcctagaaatagaataagagaaggttttttgcttcatatagcttagagtctagttgtgaaaagtaagaactcaggatttcttttccttcgaattatttataaggcagaataattatgacatatacacaaagacaaactgggaatttagaaattctaggttaagaagtcaacagaggtctttgtggacaaaatgacgtttgaactgtagtttatttatttttgagacaggttgttgctttgtttcccaggtaggagtatggtagtgatcataattcactgtagcctctaactcctgggctcataaaatcctcccgcctcagcctcccaagtagctgggactataggcacagactaccacactcggcatatatatatatttgtagagacagggtctcactgtgttgcccaggctgctcttgaactcctggcctcaagtgatcctcccaccttggcctcccagaatgttgggattacaggcatgagccactgcaccctgccttgaactgttgaactgtagtttatagtttagataaacaaaagaatggaacagcataaatacagagccaaggatggacagaagggacatgccctaatgcaacttgagaagggaactgtgagaatggagttagtattgaggggtgggggtggggttgttgccttcccaaagtagaactgagtttgatctaatctgtggtaggaaatcaggaatttcctagatttgtggtaacaggaggaatcaagtagatgtgtgtagaattgactgcatataggagaaactagccagtagatttgtaacaggtctctatgctcagcttttgttcacagagatggagcccattaggcctcccctagctctcctgggcctgatggtccaattgcaggtcagtgcctcatttggtacttagtggtctctgtttataatttccatgtctgggtcttcagcaggagaagatcctttctggagttcattttagtgggccagtgttcttcagaggctgtatctgatttgggaaagtcttagagtgatttacatgaagttattattaccagaaatagaaaaattgtgaagaatcccgattttccatcccaagggaaagatgccaagggaaagatgagtttgtctatatataccacaaacatccctctcccctcttatgcaggctctgtgctaggagctggggaatagagatgaataagacagtcttttctacccttggaccactttacagcacatgcagaagacagtcaagttgaaccctaaggggagctagtgacaaaatgtgttccttcatctgccacaggttggagagggccataccttttatgaaagctatcatatcttctgtctttaaaaccagatttatggtgaaatctcacttcctcacaccaaccgccatctgtggccccatttttctgttctactttattgccagaactctaaagaaacattatctacacaagctgggctctagatgctgtaaaaatttcccttcaactcatgactaaatctgttcttgtcaaggtcagcagtgacccccctatagccagttcagaccagcaagtatgtttttatcctacagcaacatacaacacagcagcccattgttgagacttgttttttttttttttttttttgagacagggggtctcattctgtcacccaggctggagtgcagtggtgcgatctcggctcactgcaacctccgcctcccgagttcacaccattttgcctcagcctcccgagtagctgggactacaggcgcccgccaccacacccggctaattttttgtatttttagtagagacaaggtttcaccatgttagtcaggatggtctcgatctcctgacctcgtgatccacctgcctcggcctcccaaagtgctgggattacaggcgtgagccaccgcgcctggccgagactttctttagacttgcatgttattacacattcctgattttcctcctacccatctgaatcttctttattcccaggaggcttaccggtgccttctcctcctctctctgaatcatacatgttgatgttcctgagggttcagtatttggccctcttctccctaagggatttctttccattgccatggttttcagcatcctccagatgattcttgctgctgctgaagatgataatcactgatactatctgccagtactactgttcttgatgtttaacatattcttctaattttcacattaaccttatgaagtatgtactgatacttctgttttacagatgaggaaactcaggcacagagagattaagtgacaaggccaaagccatgcttaaaaagtggcagaattggccaggcgtggtggctcacacctataatcccagcacttttggaggccgaggtgggtggatcacgaggtcaggagttaaagaccagcctggccaagatggtgaaaccccgtctctactaaaaaataaaaaaataaaaaaattagctgggcatggtggtgggcgccagctacctgggaggctgaggcacagaattgcctgaacctgggaggtggaggttgcagtgagccgagatcgcgccactgcactccagcctgggtgacagagcgaaactccatctcaaacaaacaaacaaaaaaggggcagaattgagattcaaccctgcatgggctggccctggagcctgtgtcttaatccctgtgctgcactgacacataagtctctcggccatgccttcctctgtttggaaccttttccacatattcagctgcctacttagcatttacttggacttattgacaatacctcagatcttcattggcaccatttctaaaactgtcaaacttccttgtctcagaaagtagtgctgctctccgcctagttgttcaaaccagaaacccaggagtcatctttgtgtctgctttcccttactccccacaaccagttcatcaacaagccatgttggttctaccatcacacctctcaaaatctcttatatcatctccactgccaccactatagtctaggccaccagtacttgcttccattcttgttcttcaatttattcttcatagaataatcataaaatacaagattatgtcacttcctagcttaaaactctccaaggcttccattatatgtaggaacaaatttacaccacaatgtacaatactctgtatgagtagctttcaacctgggttgcattattgcctcctccacccactgatagacatttggacacgtttggaagaatttttggaagatgcttgggaatgttaactgacatttagtgtttggaagcacacagtgaagggggcctgctacagaagcactgcctcccatgctctagccactgcctacttgttcagccagactcctggatttccagtttgggtaaatgatgttgccattgaacgaaggagagaggtaactcaggagaatagatctgggcagggaagctaatgaatactctttgtagatgttagtttgaggtggctatgagttgttcagttggagatgtatagtacccactaggtatattaagcggagggggggggggggcgcagggggggttctagcttggaggtacatagtggtcactttgacaaatatggatatccaaactggaaaagtgggtgagactcaccagggagaacatgtagttgaaatgagaagtgggtctatagaggagctctatggttgacaaacacgtaagggcctggcagagaaaaacccaaagcatacagagaaatagctgctagatagctgagggaggtccgggaggatgatatatcaggaagccgagcagagtgcaaaggacaatgttgtgagtgacattgttggatgtgccagaaaggtccagtaggttaaggccaaagcatccattgcatttgaccctttcatttcaggtgtatgtgactggggagtacaaggagggtggtattgctggtagtggtggcagcagctactacaggccaccaagaagagattgctcatttctggggtagacagaatagtgattggagctctgaatgcagcatctggatcaaaggtctatggaaatcagagaatgagtcctcagattaaaagtagaagaaagggcaagaatgtctgggcccagctagagacttggctttgagcaagacggtaattggtgacaaactttttaataaaacagtgggggaaagatgggttgctccctgagctaagaaagtacttattgwctaggtaaagggaggcttgggcctgtgggtggtggggaggaggggatgtctgcatgggtcactcagcggcttctgttgctattgggtcctctggccctgagctcagctgccctcctggtctgtgctagatgtcttagaggggcatgatggttggcagttcatggaactgtttcaaagaaattgtttgagtaataggtttttgttgttgttgttgttgttgttgttttttgtgatccttgggttagtcagtgcagttaaggagaaaaactgatgccaaagattttcttcacaacgctgcagattgaatcagctctttgccctggactgtaatttaatatatcgcagtattctgggcctgatgcaaaactttgcacatgttttttgaatttagtgagtgagcgaaactagggctttgggtgatttgaattcattttttgccattttatagcacctttgagaatccaagcacattctttttttttttttttttttttttgagacagagtctggctctgtcgcccaggttggagtgcagtggcaccatcttggctcactgcaacctctgcctcccaggttcaagcgattctcctgcctcagcctcccaagtagctgggattacaggcgtgtgctaccacacccggctaatttttttttttttttttttttgagacggagtcccgctctttagcccaggccggattgcagtggcacaatcttggctcactgcaagctccgcctcccaggttcacgccattctcctgcctcagcctcccaagtagctcgatctcctgaccttgtgatccgcccgcctcggcctcccaaagtgctgggattacaggcgtgagccaccgcgcccagcctaattttttatatttctggtagagacagggtttcagcatgttggccaggctggtctccaactcctgacctgaagtgatctgcctgcctcggcctccagagtgctgggattatgtgtgagccaccgcgcccagctcaagcacattctttgaacatgtggtgactcagttcttgcctttcaaaatcagagtccaaactaaaaaaatggaaaatcttggaattttaatatttttagggtataaagatctctttagaatctggccgggtatggtggctcatgcctgtaatcccagcactttgggaggccaaggcagacggatcacctgaggtcgggagtttgagaccagcctggccaacatggtgaaaccccgtctctactaaaaatacaaaaattagccgggcatgatggcagacacctgtaatcccagctactcgggaggctgaggcaggagaatgccttgaacctgggaggcggaggttgtggtgagccaagatcatgccactgctctccagcctgggtggtagagcaagactttgctcaaaaaaagaattttaaaaagttggaaatattttaacattattcaaacattcacttttttatttttattttttgagccagaatctttctgtgtcacccaggctggagnnnnnnnnnnnnnnnnnnnnnnnnnnnnnnnnnnnnnnnnnnnnnnnnnnnnnnnnnnnnnnnnnnnnnnnnnnnnnnnnnnnnnnnnnnnnnnnnnnnnnnnnnnnnnnnnnnnnnnnnnnnnnnnnnnnnnnnnnnnnnnnnnnnnnnnnnnnnnnnnnnnnnnnnnnnnnnnncacagtggctcatgcctgtaatcccagcactttgggaggccaaggcgggcagatcagtcgaggtcaggagttcgataccagccagcaagatggttcaataacagccgtctctacgaaaactacaaaaattagttgggcatggtggtgcatatctgtaatcctagctactcgggaggctgagaaaggagaatcgtttgaacctgggaggtgaaggttgcagtgagccgagatcgtgccactgcactccagcctaggcgaaagagcaagactccatctcagagggaaaaaaaaaaaatcacatgggaagcttttaaaaatactgacaatgtgcctctaccttacaatggctggagataaggcccaagtgtgaggtttctttctttttttttttttttggtttttttttttgtgaacgggagtctcactctgttacccaggctggagtacagtggtgcgatctcggctcactgcaagctccgcctcctggattcatgccattctcctgcctcagcctcctgagtagctgggactacaggcgcccgccaccacacccggctgatttttttgtattttagtagagannnnnnnnnnnnnnnnnnnnnnnnnnnnnnnnnnnnnnnnnnnnnnnnnnnnnnnnnnnnnnnnnnnnnnnnnnnnnnnnnnnnnnnnnnnnnnnnnnnnnnnnnnnnnnnnnnnnnnnnnnnnnnnnnnnnnnnnnnnnnnnnnnnnnnnnnnnnnnnnnnnnnnnnnnnnnnnnnnnnnnnnnnnnnnnnnnnnnnnnnnnnaaatacaaaattagccgggcgtggtggcacatgcctgtaatcctagctacttgggaggctgaggcaggagaatagcttgaacccgggagacagaggttgaggtgagccgagatcctgccattgcactccagcatccaagaacaagagcgaaactctttccccgccaaaaaaaaaaaaaagaaagaaagaaatgttgtctcagttcctacccttttcaatcagaatatgcattttgataaaatccccaagtgatttgtttgcacattaaagactgtgggagcagtgctttgagccagtagttctcagtggtgaccaaacattagaattacttttttacttgaggagtttttttgttttgttttgttttttcttttttcttttttcgagacagagtctcgctctatcaccaggctggagtgcagtggtgcaatcttactcaaggagtttttaaacaattgataccttggctccccctcagagagattctggggtaagtctggctattagtgtttttaaataaaagatttgaccgggcacagtggttcacgcctgtaatcccagcactttgggagactgaggcgggcagattacctgaggttgggagttcaagaccagcctgaccaacatggcgaaactccgtctcgactaaaattataaaattagctggccgtgttggtgcatgcctgtaaacccaggtactcgggaggctgagacaggagactcacttgaacccgggaggcggagggtgcagtgagctgagattgcgccattgcactccagcctgagcaacaagaggaaaactccgtctcaaaaaaaaaaaaaaaaaaaacatttaaaagtgcagccaaggctgagaagcactgcactagcccagttgcagtgctgcttttgctgtccctggggcaagaggtagaactccaaagcttcttaaaagtaggacagcaatgagtagagaaatattttcttaaataaatgaactatacataacatttttctggcaattttgcagaaggatctaatataaaacaatattgacacattttcatggtttctctcctataggctcaaactgtccaggttgctgaagttgaaccacagtcacagccacagccttccccagaacttctgcttccaaattctttgaagccagaagaagggcttgaagtatggaaaaactgggcccagaccaagaatgctgaactagagaaggatgctcagaacagattggcacccattgggagtgagtgtcttggaagaagagtgggctgtgtctaaaatgcaatggtactaaagtaacaggaggacaaaatgccagaaaagtggtgtctcctgtcttggggacaagagagcaacatctgtaatagtatgttgaattcaagcctagtaacaagcagtactgaccttgtgtacataataagcaggatatgtggggtttgcccaaaaccaggcatttttagacatacgggtttcaggagttgaccctaccagacctaagcagagtggcttctgggaggaaatgggaaccagggataggcactcaagcccttctttcttggcattaggctcatatactcatgttataggccagttctgacattacaggcatgaaacattctagtagatacaagtgagcatttctatcccagcaccctgatgggcagtatctgttctgagccttccagatatggacccccaggaccttcattcatttttgaggcttccgttgcagggcgccaactgctgcgattccaggaagatctcatctcctctgctgtggcagagttgaattatgggctctgtctaatgacacgggaagctcgaaatggagaaggtgaaccctatgacccagatgtgctctactatattttcctgtgtattcaaaaggtaggaaacagatcttcacaagaacatgtttgagctgtgttcctattggatgtttgctagtttagttaataaattgataagcaagaagttaaaataaggaagttctctttcaggtatacagtgagttttaaaatacacatttgttgttttttttttttttttaagttttaaaaacctacacgttcactttagaaaataacagccggggccgggcgctggtggctcacgcctgtaatcccagcgctttgggaggccgaggcaggtggatcacttgaggtcaggagttgaagacgaccagcccagccaacatggtgaaaccccatccactaaaaatagaaaaatttgccaggtgtggtggtgcactgcctataatccctgctatttgggaggctgaggcatgagaatcgcttgaacccgggaggtagaggttgcaatgagctgagatcacagcattttactccagtctgggtgacagagcgagactctgtctcaaaaattaaannnnnnnnnnnnnnnnnnnnnnnnnnnnnnnnnnnnnnnnnnnnnnnnnnnnnnnnnnnnnnnnaaaattaaaaaaaaaagaaaagaaaagaaaaaaaataagagccaggcaagatgtctcacacctgtaatcccagcactttgggaggctcaaggcaggaggatcgcttgagccccaggagtttgagaccagcctaggcaacatagtgaaaccccatctctacaaaaaattagctgggtatggtaatgcatgcctgtagtcccagctacttgggaggctgaggtgggaggattgcttgagccccagaggttggggctgtagtgagtcatgattatgtcactacactccagcctgggtgacagagtgagaccctgtctgaaaaacgaaaagaaaaaaaattagctgggtgtggtggcacacacctgtagtcccagctatttgggaggctgaggcaggaggatcccttgagctcaggagtgcgaggctgcattcagctatgattgtgccatcacacttcaatctggtctacaaagcaagaccttgcctcttaaaaaataaatacataaaataaataataaaataggaaaacaaacattattcatcctactacctaaacttctattacattattggtaattaccttgacttttttttttttttttttttttgtaattcacaaagcatttatgtaacacttttctttttgttaaacctgattttcatgaaggtaatttattcaaaacagagtcttgtgccagcatagaggttttcttctcattgttccctgcactaactacttatttgaaggagtctagctagaataatataccaatgtagttaggttttcaggacatctgtggtgaagcataacagaaatttgcagactggcagttcaagggagcagaggtggatttcttagtgtttgaaggctcttgaggagaaacccacagtataatagaatagggcttactggttgggacttattctgttgcctagtcttgagaaatgtctgcctcctagttttttcctctcttggtggtcctaacctaagtactatgtgaattgctttacatgctttcattctttgctctcccagtcctggaaggcagataccatcatctccatttacaggcaaggaaactgagtctcagaaattaaaagacttgcacatgttgtttaacttatacaatatctaatggaaggctgaccccagagcctattcatgatttttgctaacacaaaataatgcctttcttgggtgaaatagcattcacaacatctgccttatttacccaactctcaagaatgtcatgagaatcagtcacatgagcttaggcatactatggaagtgtcacatgctggtgccttggtttgttgaggtgtgaaygggtagggaaggatagtagtactggtagaaaaatatatttatttcccctgaaatccttgttcaggagactaccaataacttctattaattgtttttcttttagtatctttttgaaaatggaagggtagatgacattttctccgatctttattatgttcggttcacggagtggctacatgaagttctgaaggatgttcagccccgggtcactccacttggtaagagtctcccttgtccttggatatctttcctacctggatttaagaaagatcaatagcttctgtggttggctatgaaaagcatgtgagtgaggggggatataaatcccagactgcagcagcattggccactgtgctacttgccctgatagggaagaggcactgctcaccagagaagcctgctggttccagtgtgggaaggacacaggaacaagcagaactagtggggtagttactatcttttttttcctattaaaatgtattgattaaaattagaatcataacaattaaggattatggacagttttatctgtagagcataatttttgctttactcacaggcagscttctggacagcatgttctattggaacaaaagcataggttattcagtgtttttctttgtttgttcttaaaaaaacatggtcttggtatgttgctgagatgggcctcaaactcctgaactcaagcgatcctcctacctcagcctcctgagtagctggagctataggcatgcgctactgtgctcagctatttttgttttgttttgttttgtttgaaacggagtctcactctrtagcccagggtggagtgcagtggcacgatcttggctcactgcagcctccgcctcccaggtcccaattcaggcaattctcctacctcagcctcctgagcagctgggattacaggcatgtgccatcatgccctgctaatttttgtatttttagtagagacaggcttttgccacattggccaggctggtctcaaactcctgactttgtgatctgcccacctcggcctcccaaagtgctgggattacaggcgtgagccaccaccgtgcctggcctatttttgtttttaatagacttttttttttttttttttttttttttttgagacagagttttgctcttgttgcccaggctggagtgcaatggtgtgatcttggctcactgcagcatccacctcccagattcaagtgattctcctatcccagcctcccaagtagctgggattacaggagcatgccaccacgcctggctaatttttgtatttttactagagacagggtttcatcatattggtcatggtggtctcgaactcctgacctcaggtgatccgcccacctcggcctcccaaatgctgggattacaggcatgagccaccacggccagccaatagactttatgttttagagtacttttaggtttccagaaaaatttagcagtaagtacagagaatttccatataactccttaagtatataccctcacacacagtttctcctatcaataacatgttgcgttagtatggtacatttgttataattgataaaccaatattgatacattattgttaactatagttcatagtgctatgaactatattattgtgttgtacgttctggtttacattctgtatctgttgtacattctgagttttgatgaatgtatgatgacatgtgtcaccatcatggtgtcatatagaatgtttactgccctaaaaaatacctcttctgggccaggcatggtggctcacacctgtaatcccagcactttgggaggcagagatgggctgatcactgaatattgggagttcaagaccagcctggctaacatggtgaaaccccatctctactaaaaatacaaaaattagccaggtgtgttggcaggtacctgtaatcccagctacacgggaggctgaggtaggagaatcgcttgaaccagggagtcggaggttgtggtgagccaagattgcgccactgcattccagcctggtgacagagcgcgactccgtctcaaaaaaaaaaacaaaccttttcacctgtttatccctccctcccccagataccctgaaaaccactgatgtttttactatcttcacagttttgccttttccagaatgtcatatagttggaataattcggcatgtggccttttcagatttgttcctttcatttagcaatatgcctttaagattcctgtgtgtctttggctgggtgcagtggttcatgcctataattccagcactttgggaggccgaggcatgtggatcacaaggtcgggagatcgagaccatcctggctaacacggtgaaaccccgtctctactaaaaaatacaaaaaaattagccggttgtggtggtgggtgcctgcagtcccagctactcgggaggctgaggcaggagaatggcatgaacctgggaggcagagcttgcagtgagctgagatcgtgccactgcactccagcctgggcgacaagagcaagagtctgccccgtgccacccccgcccccccgcccaaaaaaaaaaaaaaacacagtctgggcgcggtggctcacgcctgtaatcccagcactttgggagaccaaggcaggtggatcacttgagaccaggagtccgacaccagcctggccaacacataaaacgttgtctctactaaaaatacaaaaaattggctgggagctgtggttcacacctgtaatcccagataatcccagagctttgggaggctgaggcaggtagatcatgatatcaggagatcgagaccatcctggctaacactgtgaaaccccgtctctactaaatacaaaaaattagctggacgtggtggcatgtgcctgtagtcccagctactcgggaagctgaggcaggagaattgcttgaaccagggaggcagaggttgcagtgagctgagaccacgccactccactccagcctgggtgacagagtgagactccgtctcagaaaaaaaaaaaggagtagcagctggttgcagtggctcacacccataatcctagcactttgggagaccgaggtgggaagatcagttgagcccaggagtttgggaccagcctggtcaacaaagtgagacccccatcctcattcataataaatatctaggctgggcctggtagctcacacctgtaataccagtatttcgggaggccatggtgagaggattgcttgagcccaggagttcaagaccagtctgggcaacatggtgagatcctatctccaccaaaaaataaaacacacacacacacacacacatattaaatatctgaccagatacctcaccaaagaaaatgcattgatggcacatgagtatatgaaaagatgggctgggtgcggtggctcacgtctgtaatcctagcactttaggaggccaaatgtgggtgcatcacttgaggtcgggagttcaagaccagcctggccaatatggggaaacccatatctactaaaaaaaatacaaaaattagctgcgtgtggtggcacgtgcctgtaatcccagctacttgggaggctgaggcaataaaatcacttgaacccaggaggtggaggttgcattgagttaagatcacttgccactgcactccagcctgggcaacagaatgagattctgtctccaaaaaaagatgctctcatcaggtgtcatcagagagttgcaaattgaagtaatgaaatactactgtacatttattagaatggcagaaattcaaaacaccgacagcaccaaatgctgacacagatagggagtaacatgtcatttatcacttgtggaaatgcaaaaagacacaaccactttggaagacaatttggcagtttcttacaaaagtaaacattgttgccttatgatgcagcagttgcattccttgacattcagagaagtttaaaacttgtgttcacgcaaatatccgagttttaatccctgtttaatttaataaaatacatttattaaaatgtatgctgctttacccttaaaaaagaaacttactggttagacaaattttttgagtgcctactatgtgcccagcagtctgctaggtgccggagaatataatatagcagtgaagaaaatggagcttgcactatagtaaggcaagacagtgtataaataagtaagttaactctagtactttgtctttttttttcccctccttttttgtggagagcaaggtcttgctgtattgcccaggcaggtctccaactcctgggctccagctatcctcccacctctgcctccctaagagctgggattacaggtgtgagctgctgcgcctagcaatttaagtactttgaagaacagaacacaaaggaatggaaagtgttaagagtattacaagggagggctattgttggaacagagacatgagtgactacatcactctacataatttggaagttttcaagccaagtatggatatgcagacttcacttttcagtctgttattatggaagtttcaaacataaataaacaatagattaatgaattcccccatgtacccattttccatggcaaatctttttttgttgctgttttttggcttttgagacggagtctcactctatcgcccaggctggagtgcagtggtatgatctcggctgacttcaacctccgcctctggggttcaagtgattctcgtgcctcagcctcccaagtagctgggaatacaggcatgtgccccacrcccagctaatttttttgtatttttagtagagacagggtttcaccatgttggccaggctggtctcaaactcctgacctaaagtgatccgcctgcctcagcctcccaaagtgctgggattacaggcatgagccaccgagcctggcctgttgctgtttaattcctttttgtttgtttttgtttgtttttaagtttattttttccattttaaaccttatgtataccaccacctgtttcccctctcctgtattggaagtaaattccagatactttatccatactttttttttttttttttttttttttgagatggagtctctgtgttgcctaggctggagtgcagtggtgcaatctcagcacactgccaccacctcctgggttcaagaaattattgtgcctcagcctccgagtagctgggattacaggcacctgtccaggctggtctcaaacttctggcctcaagtgatcggcccgcctcggcctcccgaagtgctgggatttcaggcatgagccaccgggcccagcctatcatacttacttacttatttatttatttacttatttatttgagacagatcctcactctgtcgcccaggctggagcgcaatgacacgatctcggttcactgcaacctctgtctgccaggttccagcaattctcctgcctcagcctccctagtagctgggattacaggcatgtgccacaacacccagataatttttatatttttagtagagatggagtttcaccatgttggccaggctggtcttgaactcctgacctcaggtgatccacccgcctcagcctcctaaagtgctgggattataggcgtgagccactgcgcctggcccggttatgtcttttaatatttactttttatttatttatttatttttttgagatggagtctcactttgtcttccaggctggagtgcagtggcacgatcttggctcactgcaacctctggctcctggattcaagcagttcttctgcctcagcctcccaagtagctgggactacaggtgcatgctgccacacccggataattttttgtattttagtagagacgaggtttcactgtgttgcctaggcttgtcttgaacctctaacctcaggtgatccacctgcctcaacctcccaaagtgctaggattacaggcgtgaactacggagcccggctcatactttaaaaaataatttaaaaaaatggctgggcacagtggctcacgcctgaattcccagcactttgtgaggctgaggtgggctgaccacgnnnnnnnnnnnnnnnnnnnnnnnnnnnnnnnnnnnnnnnnnnnnnnnnnnnnnngtgggctgaccacgaggtcaggagttcgagaccagcctggccaattatggtgaaaccccatctctactaaaaaaattacaaaaattagctgggtgtggtggtgggagcctgtaatcccagctactcgggaggctgaggcaggagaatcacttgaacccagggagaggcggggtttgcagtgagccgagatcacaccattgcactccagcccaggcaacagtgcaagactcagtctcaaaaaaataataataattaaatcaacaaaaaaggtaaatccataatgtaattaaaatctaccctttattaggctgggcgcagtggctcatgcttgtaatcccagcactttgggaggccgaagcgggtggatcatgagttcaggagatcgagaccatcctggctaacacggtgaagccctgtctctactaaaaatacaaaaaaattagctgggcgtggtggtgagtgcctgtagtcccagctattatggaggctgaggcaggagaatggtgtgaacccgggagctgagcttgcagtgagccgagatcgcgccactgccctctagcctgggcaacagaccgagactctgttttaaaaaaaaaaaatctaccctttattaaaatttttaatagtcttataaatttcattattttgatttatctgaatcaaggtcaaaattaagtctacatattgaaattggctgttgtgtttttgtttttgttttttcttgagacggaggcttgatctcggctcactgcaacttccgcctcccaagttcaagcaattctgcctcagcctcctgagtagctgggattacaggcgcgcaccatcacacccagctaatttttatatgtctggtagagatgggatttcaccaggtcaggctggtgtggaactcctgaccttgtgatctgcccgtcccctgcccttttttttttttggatacagagtctctctctcttgcccacgttggagttcagtggtgcaatctcggctcactgtaacctccacctcctgggttcaagtgattctcctgcctcagcctcccgagtagctgggactacaggcgcctgccaccacacccagctaatttttgtattttcagttgatacggggtttcaccatgttggccgcgctggtcgcgaactcttgagctcaggcaatccacctgcctcagcctcccaaagtgctaggttacaggtgtgagccaccttgcctggccttaatatttactgttcatcttaattgcccccctcccttttgtcttacagtatattcatggaagaaactagcctttgaaattgtcacacagtctaatttttgctgattgcactctgtagtgtagtttaacatgttcttttttccccatgtatctacaattgattggtaattgaatatacagattgattccggattttttgttttgttttgtttttggcaagattacttcatagttggcctttctttgatcacagtgcccataatgtctgaatccattgattctttatgggttgcaaaacagtattctaatgttattattacttcataattacttggaatataaagataaactttcctttttttttttttttttttttttaagaaacgggggtctcgatttatcacccaggctggattgcagtgatgggaacacggctcactgtagcctgtagcctcaacctcctgggcccaagcgatcctcccacctcagccctccatgtagctgggggccataggcacatgccatcatgcttgtttaatttttgtattttttgtaaagatggggttttgccatgttgcccaggctggtttcgaactcctgagcttaggcattccgcacacctcggcctcccaaagtactgggattacaggcatgagccactgttcctggccctaactttccctctttaactctttgggttcatgatggtatagattgtatagaagaggaagggttaacggctgttttttttttttgttttttctttttttctttgcttagccagttttcacaaaaatgagttagttcatcagcttctctcagtgatgtccaattaaggttttcttgttttaagagtcattgtgaacttacagatttaaacgtatttaatgagattcagctgtttgcagtcatctttactgatgcacaaatgtcccatcattggccattagaagcctctttaaattgacccctaagtccttttgacatgaccctagttgtctttcttgatttctgatttcacagaatgtttcagtcccatcttggacatttcttgttctagtgtagaatccttcagttctggagcctggttccttttattggggaatggtatttcagtgccttactctgtatgccaggggtgcttattgttcctagattggtcttgtttctaggatcttcagtgggcagaactagaaattgtttttaaagataaaatacatcattttggtgcctgtagttcagattcagaactataaggctaatacctaggttttttttatctatagccccttacttccatgctaggagccctggccctcagtcaatagagtctgttttattttattttgatttatttttttattttgagacagggtcttgctctgtttcccaggctggagtgcagtggcacaatcttgcctcactgcaacttctacctcctgggctgaagcaatccttctacctctcagcttcccaagtagctgggactgcaggtgcataccaccacacctggctagtttttgttttttttttttttttttgtagaaatggggttttgccatgttgtctaggctggtctcaaactcctaggttccagtgatccacctgccttggcctcccaaggttacacccatgagccaccatgcccaggctattttagtttttcttacagggtcttgctttgtctccccaggctggagtacaatgtcatgatgatagttcactgctgcctcaccctgttgggccgggctgggacccagnnnnnnnnnnnnnnnnnnnnctggtcttgactcctgggttcaagacagtcctcctaccttggcttcccaatgtgctgagtattatagacatgagtaaccacacccagccaagtttattacaaattgtagagaagagaataaaattagggaagtgacatcagagggagcaagtgacagagcgaacccagagaagtggaacatgccaaagtatggcaataattgttcccaggagaaaaattatttttttaagaaaaggaaggccaggcatggtggctcccgcctgtaatcccagaactttggtaggccgaggtaggagaattgcttcagcccaagatttgaagaccagcctgggcaacatagcaagacctcatctccactaaaaatcaaaaaaaataatcgagtgtgatggtgcacacctgtgatcccagctactagggaggctgaggtgagaggattccttgaatccttctttgctgagaagggctgttttctgctcatcctggatcttgggggcttcagatatgtctaagagcagaaaagcttttcccattgccactgggtcacaaaatagccgaaaagtagacaaaaaatagagtcagaactgccttaaagagatggaaatgcactattagagagccagctttgttttggcaagagcatagaacacagaagaggagtgtatcgggcagaatgttcttttttctgcttccaggaagtgtcacacactgtgcttgcttggagaatcccgaaaccctgcaggagaatactgttgcctgctcctatctcattatgcacccagtgcacaaacatgtgcatactgactgacttcagcacatgaaggggcttggtagtcattcaaatgtcatctttctttggtgcagacctggctgaccagggctcttattcaaattattgacctttgcctgtacctagctctgggctcacttatgaaccagggtcttacagtaacaccagccctgtgggggggatcttgtaatagttcaaatactggcatattggctaggcgtggtggttcacgcctgtatttctaactgctcaggaaactggcaggaggagtctttgagtccaagagctcaaggctgcagttagccatgattgtgtcactgtactctagcttgggtgacagagcgaaaccccatctcttttttttcccttttttttttttttgagacaggatctcactctgtcacccaggcttaagtacagtggtgcgatcacggctcactgcagccttgacctcccaggcccaaggaatcctcccacctcagcctccctggtagctgggatcacagatgtgcaccatcacacgactaatttttttgattttcagtggagatgaggtctggctatgttgcccaggctggtcttcaactcttgggctcaaacaattctcccacctccgcctcccaaagttctcggattacaggcgtgagccaccatgcctggtcttccttttttaaaaaaagataaatattgtagaagagaccctgtatcttagctaataataataataataataataataataataaaatcccccaaagagtatcagtctctttatctagagaagaaatgacaatagccgttttttttgttttttttgtttttttgtttttttgtttttgagatgggagtctcgctctgttgccgaggctggagtgcagtggtgcaatctcggctcactgcaagctccaccttctgggttcacaccattctcctgtctcagcctcccgattagctgggactacaggagcccgccaccacacccggctattttttgtgtttttagtagagacggggtttcaccatattggccaggatggtctcaatctcctgacctcgtgatccacccgcctcggccttccaaagtgctgggattacaggcatcagccactgcgcctggccggccttgctttttagagacagttgagatgagagaagacttggtaagggcaaacgggcgtgcatgccagttctttgggtcctggaccacctttgaaaatatgcaaagctctgtacactctcagagaattatgcatatatgcagagtttggtttatagttttctgtacttcactgtctctgagggcagtctttttgccctgtgttagccttggattagagggtaacaacaatcatgtaaggctgtggttctcaagtgtggtgttagaagtgctcatcatcaggttccacctcagaaacagattgggacccagctatctgtgttttaagaagctttccagatgatttttgccacactttagggagagtcccctgatgaaatttatactcctgtgtggtccttatgcttcacacatcccatattgtacctttgagagaccacctgccatcctcttgttgtgacagtactctattcctcctaggctatgtcttgcccagccacgtgactgaggagatgctatgggagtgcaagcagcttggggctcactccccctccaccttgctgaccaccctcatgttctttaataccaagtaagtgttctagaggctccactgctggcatctgtccagtgaagagtgtggaarctatccaagaggccttctgaattcctctgacatatatttgagaaactgggctactgaaagccctaaccccacttggctgcattttatttggtaaccagtgaggcaaacacccttgccagacccctaccatccatcttgatgtggttcctgcactggacactgcttgggtacgggcctgcccagatcttgggaatgtgggcagtggctcctctgaagcaccagtgggcagaggatgagtcatggtatcctcccggcacccctccctctgccttgcattttacttgtgatccaggtacttcctattgaagacagtggaccagcacatgaagctggccttctccaaggtcttgcgacagacaaagaagaacccctctaatcccaaggataaaagcacgagtatccggtacttgaaggcccttggaatacaccagactggccagaaaggtagggaaaggaggcagggatggcaaaaacaggtgctacttgtcctgccctgtcctgcccttgtgcctgtgaggctagtgataagtgtaaaggttgggatttgctggataaaattctccactcccttctccccagccaaaaattccaaactttcctcctagaagcagagaagccccagacagaatagctgcctcttcccttagtagtcactgcccatgcctcataccttccctcccccgaccctgtatttcctagttgggctggctgaaagcctaagtttcctgatctgggcctgaggtaaggcagtctgatgccaggtctgtggtggtggggatgtgtgttttatagttacagatgacatgtatgcagaacagacggaaaatccagagaatccattgagatgtcccatcaagctctatgatttctacctcttcaaatggtgaggctttattgtgacttgctgtccatgtgtgcgcatgtgtgtgtatgcgtgtgcatgctcacttgtgtgatcacttatcataggggagaggcattctctagtcccaaaccaagtaaaaacacttccagaaagctaaatttagaagcagccttgctctggctttccaaaggtgtgtgatgtgcctagcactgatagaaaaaggggtcccgggtccctacagtcacctttcatgaaaagggtatgaaggtacagagaatctaccttcatcacatattgagcatggccctgcttcctgaccttgaccttttgtcactgccatcattaatctaggtgagactcctctcagctttttctcccttttgccccttcaatggtttctcattacatagtaattcttttatggcagacaactcctttgatgcactcccccttgctaacctcatgtctgtggagctcttagttccctagccacactagctcctctccactcaaggacatcatattatgcctcttctcaacttaaacacagcttatcagggaagcatttccagattccccacctcttccctgtgactgtttcctcggtagcacttatcactgttttttattttgtatttgtttaactttaattgctacctgtgtcccctcctatctgtaagctccatgggtaggaaatacttttcctgcccatttttttaaatatcagcacctagtgctgacctggcactagtaacccttgaataaatcttgaatggatggatgaataactgttagaggatacagcatgccaagtacttaatagaggtacagcacagttcgggggaggggggtgaacccaagtttagggccccactgtaatggccatcattattgggtagaaaacacaacatgaggctgggcaccgtggctcacgcctgtaatccaagcactttgggaggccaaggtgggtggatcacctgaggtcaggagttcgagaccagcctggccaacatggaaaaaccccatctctactaaaaaatacaaaaattagctgggcttggtggctcgtgcctatggttccagctactccagaggctgaggcaggagaatcgcttcaaccaagggggcggaggttgcagtgagctgagatcacctcactgcactccagcctggagacaagacgccatctcaaaaaaaaaaaaaaaaaaagcgcaaagacttggagatagacgctttgagcagtgaagctggcttcaagtaggataaggatagactcacatgagtccatgagagccctaggctggtgcagtcagtgatggatcacagctggtttgtgggaaggaggggcagaggggaagtaacccaacatttgggggatttgcagtagtcccaaaggaggaccaggatgtagtgtgtggtggctgcatggaattcagtagctgtgccacaataacttggggccttactgtttgcagacagcatctgtctgggaagttcagggtgggagggttgaagttatattggtggtacccaacttttatccgcatattcttcagcccccagagtgtgaaaggccggaatgacaccttttacctgacacctgagccagtggtggcccccaacagcccaatctggtactcagtccagcctatcagcagagagcagatgggacaaatgctgacgcggatcctggtgataagagaaattcaggaggccatcgcagtggccartgcaagcactatgcactgagatgccttggccatggcacaagagaaaccagccaggaaaaaccagacagactttcacactaaagaagaggcctccatttttttttttcttttttttattggtgtagttacgaagcctttcaggctgcttctgtttaaaatataaaagaaaactttgccccctttgcatcttcataaacctgctgcggcagactcctcagccgatggtggctctgggtttccttgagtgtcatatgtcctagaaagttgctggctgactcttttttgtctggggcctggggaaagggcttggactgtgaaaagaaatgtggcccctttccatcttcaagagagatggaattaatgatggatggaccctggagggaatctccccagccgacttccactgggctgacagactttgctgaccacaggggaacgatgttcttttctttcttcatgatcagacataaacttagcatcttaatggaagaaaaatgaggggaacttcaattatgatttattaaagacaatttctattacaccctcctttatgacaagtgacattttagatgtaaaagtaaaaactttaccatgccttttttttttttgttggcctaacattgaggccttaaaacctgaggctcctgtgcctgatggaattcttgtaacatacacttgtgtatcatataaagataccactctgtttctcttatgtattcttamtctagttgtttattaagaatgacaagcacgtcttttcaacatgttagtgaacaacgtctctttattttggggaggagcccggcgggacagtagaagtaaacccttgcctgttaattgaactggccgaggtcctgcggggagtgtggggtgggacgtgaagtggcagctcctcagtgacaaggccactatgtgctatacgcatgcgctgtttcttcagcgccagctccgcccccgcygcagcgaggcgggtaggttccgcccgcgcgcactacgccctgacgtcagcgtcgcgcgcagcgcagtgacgaaatcggctggtttatattggcgcggcccagacggcagaggtctctgcggcgcggtcctcggagacacgcggcggtgtcctgtgttggccatggccgactacctgattagtgggggcacgtcctacgtgccagacgacggactcacagcacagcagctcttcaactgcggagacggcctcacctacaagtgcgggcctatggggctcacctgggcgaagagaggggcggcaccctggggaaaaggccagatgggggcttccgagagccgccttgggcgtgggcgtgggggacaggtttcgggaattggccacccacctccggggctcactttgagacatctggagcggtgcttggggtacggagaagcatctcagtagtgcttggaatctcaggccggagattccatgctccagacacatggaattgtcagggtgccaggagcactgatgacagctcggtggcagaaaaggtcccctgtacccatttccaccttgtgctgtgcctgtgacacacagactctgtcagtgccactctctgctcacatgcgttacgggttgattggtacatggggatggagtctcatgctgccctaagctgagagctttactcccaattcactcccttccctcrcagtgactttctcattctccctgggtacatcgacttcactgcagaccaggtggtgagtatgatcaggaattgggtcctgaacatcaaggtgagctaaggtgctactatcacctggtstctgggctaactcaccagattgggcttgggggtggattttataggatcatgttgcttgttagcatgcaggtcatacaaaagtgcctttttgtgggggactcagtaacaccttgaggtgtaagggatgctttcccacactggttgacgtttgtctcctcaggacctgacttctgctctgaccaagaaaatcactcttaagaccccactggtttcctctcccatggacacagtcacagaggctgggatggccatagcaatggcggtgagccccatggggtgtgggggaaggagcaaggactccatcgcctttccccaaaggcattcagtcctgcttcttgtcacttagtagtagtctctttttatcctgtagcttacaggcggtattggcttcatccaccacaactgtacacctgaattccaggccaatgaagttcggaaagtgaaggtcagaagggcaacgatcattagcaagcgctcctgggaattgcactgaggtggggtggggtgggagtaggggtttattctaatttagtattctttcttcccaccatggggttcagttactgagaagaccctgagattctgtttcttaaagcagcagcaatagaccaggtgtacagtgcctccagcctacccatgtctctaagatgtgttggtgtgatttggtcttgtggcactgccaaagggatcgataagcagagaccccatgcttcagatcaagagcctgatgaaagtagttcaaagatgcgatgccctttctcaccatccctttccagaaatatgaacagggattcatcacagaccctgtggtcctcagccccaaggatcgcgtgcgggatgtttttgaggccaaggcccggcatggtttctgcggtatcccaatcacagacacaggccggatggggagccgcttggtgggcatcatctcctccagggacattgattttctcaaagaggaggaacatgactgtttcttggaagaggtgggtgccactggcagagtagatccaagctctagcagcccaggttgaagacaaggggcttctgttgtctaagacatctctgatagcctcttctctctgggaaaggagtgtcaaaccaagtttctgactcctttattgggttcctgcatcctttccccaccagaggctttcaaactgcccaaatgcttgctagtattcatgctttgttcttttaaacccctaaggtaggggcagtgcttgaggtctgccctgattttcttgccattgttcctgtgttgtcctccttattccatagtgtaagagggtgctccctgtgccatgttgtcctttctactcatccctcactcaataccatactgctaagaattattgggatcccttgaggaagggtgttttgggtgtgaatgtatgaacgtggtggtccatagaacttcacccctgtaatctcagtactttgggagactgaggcaggcaaatcatgaggttaggagtttgagaccagcctggccaacatggtgaaaccccgtctctactaaaaatacaaaaaattagttgggtgtggtggcgcgtgcctctgagctcagctacttgggaaggaaagaaaagagttaactggtcatagtcgatgactggcccttcttcacatctcacctcccacgtagataatgacaaagagggaagacttggtggtagcccctgcaggcatcacactgaaggaggcaaatgaaattctgcagcgcagcaagaagggtaagtcctagagctgggaaagggcctggaactaatgcctagggtcctgattcatgtcctgccctgaccacaggaaagttgcccattgtaaatgaagatgatgagcttgtggccatcattgcccggacagacctgaagaagaatcgggactacccactagcctccaaagatgccaagaaacagctgctgtgtggggcagccattggcactcatgaggatgacaagtataggctggacttgctcgcccaggctggtgtggatgtagtggttttggtgagctgcyacacaggtgggttggggcaataggggcagctgccacatcacagtctgagacttacttcttgtcctaggactcttcccagggaaattccatcttccagatcaatatgatcaagtacatcaaagacaaataccctaatctccaagtcattggaggcaatggtaaggcaagattgtgccctgaaggatgtgtggtgggagtgggtaagctgggctcccaccttaaccttcacatgagcattttcctttccttcaccatagtggtcactgctgcccaggccaagaacctcattgatgcaggtgtggatgccctgcgggtgggcatgggaagtggctccatctgcattacgcaggaaggtaagaatatactttgatagggcccacagagaccccagtttcaggccccacataccttggaaccaagcactcttatggggacaatagagccctccaataggggcaaccckggggccaaattggcctcttggatgggtgacatggctggaagcaagacaaggtcttgtcatccatcacctgccactcccttgcctagcctggccttcttgctcctgctctgcaccttctctaaactctggtctgtttgttttatttagtggctcccaagatccctccagacataaagtcccacagccccaaatgcccttctactgtcacgggttgctatagtaagtccagcccggcccactggcccggcccagctgcccactgcccggctgcttggttgacgtagctgtagctcccggggtttgtggtgctgatgggtgggcaaggccaactgatacacagaccatggtttgggggtggtgctcaagaacatagctccctcttccttctggggtgctgatagggcaggaccttcttccctaggcaggaccttttctgcccacatcttctgcagtaggcatagttcagggaccaactcctttgtgtggtccttgctctcccacacaaccactgcctgctccacacaaccacagcctgctctcctacacaaccactgcccttatcttgcctgagctgcccaccattcagggaggaagggctgggcctgacctcagtgcctctggggactaactgcacggtgactcctgccccatctgataccagctggacgggggctttcccggctgctaagactgcatgtgcctgaggctgccctgggcactgcacacatgcacgtgcacatgtgggggtgagtagaggtcagcacagctgtttgtactatttaaggcagatgtggcagcagccatcccagacacgtctgttcctcagccaagctgcagtcctgatgcagatgtagccaaaagctcctgggtcctaaatatggccacagggtccactgcccgtccccattaaccctatccacccatgtgttcctccatctcaacagtgctggcctgtgggcggccccaagcaacagcagtgtacaaggtgtcagagtatgcacggcgctttggtgttccggtcattgctgatggaggaatccaaaatgtgggtcatattgcgaaagccttggcccttggggcctccacaggtgaggcccagtacccgtgaaggccagtgggaccccctccctagtgctgcttaggctctaacccaagcactccatctgtccgcagtcatgatgggctctctcctggctgccaccactgaggcccctggtgaatacttcttttccgatgggatccggctaaagaaatatcgcggtatgggttctctcgatgccatggacaagcacctcagcagccagaacagatatttcaggtgggacaggcaagccagttacccyaccctaatcctgcactgayagtctcatctctgctgtgaccttgcccgtgtctctgcctctccctgcagtgaagctgacaaaatcaaagtggcccagggagtgtctggtgctgtgcaggacaaagggtcaatccacaaatttgtcccttacctgattgctggcatccaacactcatgccaggacattggtgccaagagcttgacccaagtccggtgagcttggggagctgggacatgggtagaggggctggtccagggccagctacccacatttgacctctgcccttcttcagagccatgatgtactctggggagcttaagtttgagaagagaacgtcctcagcccaggtggaaggtggcgtccatagcctccattcgtaagtcaccctgtccttggtggggcctctgccatacctcatgcctcctttctcctgccctcacctcacaggtggtccttctgcctgcaggtatgagaagcggcttttctgaaaagggatccagcacacctcctcggtttttttttcaataaaagtttagaaagaaaaaagtgatgcctgatctttcaacagacakgtggggctctgtagctgccactaccacagatgcacacaaaaacagcaccctcatttccagggggagcytcagsscccgagataaatgtgctccatggacctggaagcgggtagttccaggtccaaaaagttcctcctgaggctgctcacaaaacagctgactatagctatagctatggctcttggggtttcagtctcacactgagcatctgactctggctcccaaggggtcaaagaacaagccctgggactggcatacacagggcatcctgctagcccatagcttggccatataggaccaggtcaacacacatatatattccctaacttgaatctctctcggccaggcacattggctcacgtctgtaatcccagcactttgggaggcaggtggatcacttgagrtcaggagttcgagaccatcctggccaacatggtgaaccctttctctactaaaaatacaaaaattagctgggcgtggtgatgcatacctctagtcccagctactcaggaggctgaggcaggagaatcactgaaacccaggaggcggaggttgcagtgagctgagactgcgccactgcactccaccctggcgaaagagcaagactcatctccagaaaaaaaaaaaaaaaaaaaagcccagtgtagtggtaggggcctctaattccagctactcaggaggctgaggcacgagaatcgcttgaatccaggaggtggaggttgtagtgggccaagatcacgccactgcactgcagcccgggcgacagcgagactccatctcaaaaaaagaaaaacaatcagcgattttgtgagaaaagccgttgaggtcctctcaaatctgcatgtgagcaagtaggtctacaacaggcaaacatactgcttcccgacttctgaaaagtcaaggaatcctaagtaatctagatgaaaaagtgactccttggtttcttcacattcccctccaagagcccagtgagccatcagctcctggccagcaacacacctgatacaaaatgggagaagtgtataaattattatgttgataagcaagataagtgccaaagggtagataagagtgaaagcattgggaagcctggcagagtgcagtcagcaggtcagttcctggcggttcattgagcagcttggcccaaagatgtaagtgaagtccctcctggtggagggatgagagcagctccagttactcggccttcatgacacaggaagttgaaggtggcacaggcattgggctgcaaagaaaaggccagcatcagcctgtctagcgccaggcctgtgctccccgcagcatgccccagtcccgggactcaccgtgtcctgcacttccacagcaatgccccgctgcctcatggcttgaagcacctgggactgcagcctctcggtccggtctccagtccccaccaccacgatctctagggaagggtgggtgtggctagtctacagttctgttgagaggctgcagtgggggtcgccttctggggcccagaacacctctgttctccctccccttccccagtacctatccggggctccagcaaccagaagagggaaaagctgtcttcggtgatgtcctggtgggatcccacctgtgcagggaggaggcacatttaatacgacaaatccacgcagcctctccccatctccatccactgcaggaggagacagaggaaagccaagtttgcagggaccaagcagggtgagggcctgtgactctgggcctcagtttccacactgcgggccaggactcacgttccactgcaccaccgagtgcgggagcagagcgcaggggccgagcacgcggtttccgtttatcatgaagccgcggctgttgtagctgtcgatgtacattgcctgagcggcctcgcgttgcagcagagagatgcgcgtccgctgatacagctcgtcatccgccggcgagagccgatgccctcgccgcggggccctgcggagggaaagggtcaggggcgcggggccgggccgggcagcccgagaggccggaaggtgctgggctggcagtcgccggcctagggggctggatggtcgagggcgcggggtccaagctcaccagggaagctcaacgggcggacagcgcagcgagggtcgcgctcggtacaagctacgtagcgcgagagcggtggccatggctgaccaacgcgcggcgaagtcgtcaccggcgccgttagtccccgggttgggagggccctgcggagcctgacccagcgtggctgcagcgccccctgcgtcccggagggcaccgcacagctcgaccggcccagcaggcgagtgtcctcagtcttaggaggccgagttccccgacctccggcgcagctccagtgtcagcacctgccgccctccccgccccgggcccttgcccatagtcccgggggagtggaacacctggcagcgtggccaccctcagggcgttgcctgggccgcagccgcggcctggcccccgggctctcagctattaagccgcgctcccggggcggggcgaccgcccacctggtcgcgtcccgaacacctggccaggcggtgggtgccagacttctagcccctaattccagcctttggggcttcgggcaccgtgggcggggcagccggctcaagtttctccggctagacgcggaagcacgccccgccctaaccgtcacccgcgcgaccgttggcctctccgcagcgcgcggagaggggcgtggccgagcgtggattggcttctcgggttctctagggggcgtggccaggtggtttctccttaaaatggctccaagtctgcaggcagccagagcaagcggaagggcaagctgtgatagtgtttgggtggctgttcggctggcccagaccaggccgaaccggaccagacttgaagtagaagcgcgtggagcatcaccttgtcctcgttcactctgctcgcgtcctgggagtcccccgtcccccgtcttgatccaagtcaagggcctactggcgcgagagtcgctggcccccgcgcggggtttgggcatctcggcacgccggctctgtcgtggcctcaggggaacattgtcgctttcgctacccgcggggccgggcgagcgggaagctcggcacagtgggagcctggtggtgggtctcctggggccggtcgcaatgggtttccgggggtcccgcggctgctctgtggaccccttcggcccctggtgctccgggcgctggcagcgtcaccggacaaaggccaccgagcgcgggggtgtccccgaggtggacgcgcgggtttacttcctctccggccccacgggcgcgcttccctcctgacggattccgaagcccgccccaccaccgtcaccgcaccagtggcccaggcttcgtgggaccaacagggctaatcctgccccacggatctaatccggatcgggacccggtcccaggggaggcccccacctccccttctattgttctgtggcccaggtgagcgtcttgttccctctagactccgtttcacaacctactcccgggtcttcctcctgggactggggatgggcgggttctgatgtggccccagggcgagtgacctgggggcaggagctcccccgccccccgccaacggctggacagcgggcaacggaatcccaaaagcagctgttgtctccagagcattccagctgcgcttggatttcgtcccctgctctcctgcctgagcagcgccctggcccagatggggtgcccctgacccccagacatactttactgagctgcttgggtctcagttcctctcagttgcgccctcaggctggaggtgatgggtgtagacgtgggagagccgaggctggtggccatctctggaaccctggggaggattggcgagggagggtggacccaggacctctgggtagggctgcaatggtagtgactcccccagggctgcctcagcccgcatctcgctaaagatagccctcttacttcctggggaaaaaccaccccaaccgtcttcgtggatgagagtatctgaagtcctcagtttgactgagggttcccaaccctgctaagcagttgtctccaggtcatgcaccttcagaatggaaagcgctttggaatgacacgatcactcccgttgagtgggcacccgagaagccatcgggaatgtcgtgtccgcccagtgctctttcggcgcctcccagcagggcctcagccctggcccagaaaggggccttgccaagcttttcctgcccctgggtttccctgctctccggatttcccaactctctctactgagttagcttctctattaaaaggaatgggggtggggtggggggtgagtaagttacagtgaaatgaagacatttgggaacctttgtgggagaaagaaaaagacctttcctattggtagaggagcaagatactccaactgaggcctattttctattatggtcgcattatttggttggcccgtaaatggctgttgcctaaaacaggaagctttaaggatcgttgttaaagcacaccaggttaaaggagtcacattaaaagctggtcattctgagccgggcgcggtggctcacgcctgtaatcccagcactttgggaggccgaggcaggcggatcacctgaggtcgggagttcgaggcttgacaaacatggagaaaccccgtctctattaaaaatacaaaagtagccgggcgtggtggcgcgtgcctgtaatcccagctacttgggagactgaggcaggataatcacttgaacccgggagggggaggttgcggtgagccaagatcacaccactgtactccagcctgggcaacaggagcgaaactccgtctcaaaaaaaaaaaaaaaaagtctggtaattctggaagccatcatgatggttgtgatttctcaggtatcaagagaagaaaaccgccaactgtatcagagtgcttatttattgggcataaagaccacccgggctgggtgcagtggctgatgcctgtaatcccagcactttcggaggccgaggcgggcaggtcacgaggtcaggagttcgagaccagcctggccaacatggcgaaaccccgtctctactaaaaatacaaaaattagccgggcgtggtggcgggcgcccgtaatcccagctactcgggaggctgaggaggagaatcctgtgaatccgggaggtggaggctgcagtgagccgagatcgtgccactgcactccagcctgggagacaagagcaagactccgtctcaaacaaacaaaaaaacacccatatctcaaacgagaaaatgcttgcaaataacctgaaaccgcggaacactattctttttaaaacgagatattttaagtaggtcgtgaaagtggccttaatgttatactgccttattccagtgacgaatattcatcatgtgtaaaatgggagaaatgaaatgttattaaaacaaacatgtgagacttcgatgagaagagacggtacccggtctaagcgcccaccgggtcgcgaggatccttttcctggttaaggcctgggtcacagcgaaagaaccctaggcccagggagggccccgagatttcagatccggggcccggctgtgcaggtggaccacgcggaaggggcgctgggggcggtaggtcgaaagcagccgacagggctaccactggcgcacctgtccacttacggggaccaccgccgcatccccgccccagctagtcggtcctttccggaagttccacctccctaaatttttttccggttccgcttactccttccggtcaccatggcgaccaggcgccttggggtcggggagacgctgggggccctcaacgcggccctggggccaggcggtccggtgtggatcaaggagacgcgcacccgccacctgcgttcccgagactttctggcaccgcaccgcgcgctgcaggcgcgcttcgatgacggccaggtgggcgtgagccgggcggggccgtgcggccgggagatgggccccgtgccgtggctcttttacacgcccgttctcccgcaggttccggagcatttgctccatgccctcgcctgcctgcagggccccggtgtggccccggtgctgcgctgcgcgccgacccccgcgggtctgtctctccaactgcagcggtccgccgtcttcgagcgcgtcctcagcgccgtggccgcctatgccacgcccgcctcgcctgcctcgctgggccagcgcgtcttactacactgcccagcactgcgcagctccccctgcgcactccgcttgagccagctgcgtacggtgctcgtggccgatcacctggcgcgagccctgcgcgctcacgggtgagcggggccgcggggccggaatggagaaagtgggactgccgggtacctagaaagcgagcggcgccgcccgtggggactgcggctggaggtgggaagtcgtggcgagctggaccaggtgctcagactgaggcggccgccctcccttcgcaggagtgtgcgtgnnnnnnnnnnnnnnnnnnnnnnnnnnnnnnnnnnnnnnnnnnnnnnnnnnnnnnnnnnnnnnnnnnnnnnnnnnnnnnnnnnnnnnnnnnnnnnnnnnnnnnnnnnnnnnnnnnnnnnnnnnnnnnnnnnnnnnnnnnnnnnnnnnnnnnnnnnnnnnnnnnnnnnnnnnnnnnnn

SEQ ID NO: 94499 - DNA, 13784 bp, Homo sapiens
aattgctggaatctgggaggtggaggctgcagtgagctgagattgtgccactgcaccacagcctgggtgacagagcaagattccatctcaggaaaaaaaaaaaaaaaagtattttcaaatcatctgactcctcctctctcccagtgcaatgactttaggcagcagtccccaacctttttggtaccagggactggtttgtggaagacagtttttccactgacccgggggaaatgattttgagatgattcaaacattacatttattgtgtactttattactatttttaaaaattattattattatttttagagacagagttttgctcttgttgcccaggctggagtgcaatggcgcaatcttggctcactgcagcctccgcctcccgggctcaagcaattctcctgcctcagcctcccaagtagctgggattacgggcatgtgccaccacgcctggctaattttgtatttttagtagagatggggtttctccatgttggtcaagctggtctcgaactcccgacctcaggtgatccaccacctcggcctcccaaagtgctgggattacaggcatgagccaccgcacccggcctgtgcactttatttctattattattacattataatatataatgaaataattatacatctcaccataatgtagaatcagtgggagccatgaacttgttttccgcaactagacggtcccatctgggggtgatgggagatagtgacagatcatcaggcattagattctcataaggagcacacagcctagatccctcgcatgcacagttcacgtaaggtagggttcaggatcctgtgagaatctaatgccgccgcggatctgacaggaggtggagctcaggctgtaatgccagtgatggggagcagctgtaaatacagatgaagcttcactcacttgcccactgctcacctcctgctatttggcctggttcctaacaggccacagacaggtactggtccgtggcctggggtttggggacttctgcattaggggaaccgttaggaggacttgctgacctcaggagtacccaaggtgcctttatctttgtgacctttgatctctcagggtcactaagatggagcaaggtaaagccaaggcccagagtggtgggcgggaggcagttcttccccaccgctcctcacctctctctgtctcctcccgtcccacccccaagtctgttcacacagcgagcctgcagttttcaaggtggcttgtcaaggacatctcctgacatgcacgttcacctcctgaccttgttcctgctgtaaatttgtgaattaagtggggacatagacatatgcagagactactggtggcagtactagccttgtatttcagtagaatatatttggttcatttccttcttcccagtctccctgagtgatggttccagaacccagctccctgcactccggttcttccaaggtggagaaattggggtgtaggcagctgatctgaacaagggctggtggcactgtattttccccctgggttgaacagtcaccgtgtcctgctcctcccactactgtggggccccagctgtggatccaagcctgccagggaagctgtccccactagggcttctcacccagccagccgccatctcaccccaaatgtcactgtcctgaccatctctgctgtctggccctgtaacctgtttccttctttctctaagttcccaccctctctgtccaatccacattatggcagctggtatcctccccgttctcttcactcaggcagtcacgaacgtcatctccaggaagtttcattttgcttccccttgcggcccctgccctttgtacccaaaacaaagagaggcagtcgactgtccctggcactgagtttgtgctgcctgggccctgcctctccgcctgcctcagagtgtgggctgcagaatgggcccggggagggagaccggatttctttgattctgagccccgtgttttccacgtgtgacatttctgaaatcaggacaggtctcagaatcaatggcacctccaatatgggagtcttccttttagtgtctgaaaatggcttttaggtgagaaaataaagtgataaggagagaatggtaagaggattgggcccctttcagcagttagccaggcttgtatgccacgggtcacagagagagttaattcccttcgaggtctgggtctgccaggatgaggaaaacctgtcgctaacccttacgggagctcacagtgcagtgaggggacagcccaggaccagcgcagtacaggggatgaggggtgagccgggccccataggaacctgtgtggccctgggagcctgtggatctgctccatcccgcccacactgactttcctcaccactcttatcagtcttaaaagaacacagcctgcagcagtacctttgcattcctccataggcaaagatttccaggaaaagcagaggaaacaatggtgtattcgctgccttctgccttggtctggtttattttaaaatctgagccttcagtaatggctgcctgggcccccggcccagccactgctcttggcgtgttggcctcctggcgggggcaacagaggcgctgtgaacgccacctgttaaccccgatggccctgcctgccccaccacagctggagttggccacggccaagaacgacatgaaccggcacctgcacgagtacatggagatgtgcagcatgaagcgcggcctggacgtgcagatggagacctgccgccggctcatcacccagtctggagaccggtaggcgcctcccctgggcatggggccttccagggggacacagcggggagaaaggttggaacacagccccagagaccctcaggcaatgactgggtcacatcttgctgtggggctgccctttgggagttacctggtggggctggcccagacccacagctctctcccttggcagttggatgagctatgtccattcatgacgggagggctgaaacctcccaaggccaccagctctggtggttcccctggttagaggcagtttaaaaactggcaaggaacagaagggttgtgggggcagatttttatctaaagtcagggccatgatttgtgcatttgaccctgtgtaagttacaccgcaacaagaaagtgaatttttaaaaatcacaaaaatactgcagatagacataaagccaaggccctagagtcagggtgctggaggctcagcagcttctctcctactgtgacttcagctatttctttttttttttttttttggctcactacaacctccgcctcccaggttcaagtgattatcttgcctcagcctccaaggcgcccgccaccacacctggctaatttttgcatttttagtagagatggggtttcaccatgttggccaggcttgccttgaactcctgacgtcgtgatccacccgcctctgcctcccaaagtgctggaattacaggcgtgagccatcatgcctgacctcagcctctgagttcccaagacacaggcggggcccatttccctgtcagggtgggtttggagagagttcagtccctgccgctccctcgccatcccgcggccccgccctcgcttccggtacttctcacgggctgccagagggtgaggcagcaggaggaggagtgccgtccgtcttcaggattcctgcctgccccaaggttgacaactggtgtttttttctagaaagtctcctgctttcactgcggtcccgcttagcgacccgccgccgccgccaagcgaggctgaggactccgatcgcgatgtctcatctgacagctccatgagatagagacctgcctcccccttgcacccgaggccctcgcagcagggagctcagcgaggcagagggtggggctgcacagaggggaacatcagctgcagctctgcaccaggccggtccctggggactggggcgctcctccctcaggctttctccctcagtcttggcttctccagggctctggggtgtctggagctaggcttggccctaccattctggggccatttccaccacagttggggctctcctgccttcacgcgtgggtgtctgctacttccccatctttaaaatgctgccagagcgattgcggcccctcaccttgtccacgtatcaggaatgtgaatgtgggacctttcctccatccctgttgtccggagccagctcactgtcttccacactggtgctaactggcccaggcactggagtggaatagaatgcagctggaggctacgcatggcctctgcagcacacgcagctggagagggcttctgtccctgtcagcggcagagggcgttggggctggccggggcaccttgtccctgctatggtccacatgctcacgctgtccacctgccaggtggagtgtatgtggctgtggccctccctcgtggaggtgccgtgctttaaagaggccttagtgcccgggatgggcacagtgttttgaagggaggtgggagctcttgctctcctggtcactgcagaatgacagagaaggtgaagctccatgcatgtgtgcgcgggtgtatgtgcgctcagggtctctgtttaagtatcagctaaagatgtgcttcctccgtgtctgtcatacactgagaccaacaggctacagtgtccctgattcttggaaaagcctggagaagctggggagatgcggttcacaatgcctcggtataggaggctgtgttgagctgacattcaaatggattctttaataataatgaaactggcgagtatttattgtgcactttggtgtcactgtctcaagcacttcctaatattcactagtttgaactctgaggtaggtactttttttttttttgagatggagtctcatactctgttgcctaggctggagtgcagtggtgtggtctcagctcactgcagcctctgcctccggggtgcaagcgattctcctgcttcagcatgcctgtagctgggactataggcatgtgccatgaagcctggctgatttttgtaattttagtagagacggagtttcaccatgttggccaggctggtctcaaactcctgacctcaggtgatacacccaccttggcctcccaaagtgctggggttacaggcgtgcgcgctctaccgaggtatgtacttttgtctccactaggtaagcacacgtgcaaagtgaggcccgggagtaactgcccaaagcaactgagccgttcagtggcagagccaggggtctggacctaggtcccagctacacgccttgcccctacccaagttcccctaaggacgatgatggaaataagtcaccctgacacatctcagttcatcttcctcaaaactatgcgaggtgggcatttttaccgatttttaaacattatatagtccttaccgccttgggcatggttttaggtacttggtttacctagatgaatcctgcttgaagaccttaggggctggccacgatgtcctcagataagacacgagggcacagaaagcaatagagcacgtgctcaagacctcacagctgcggaggccaagctggaattgcccgctgcagctcagctccaggctgagctccactaaccagtcagcgtcagagcccagtgcgagccctgacttcctccacctgtcagcctccctggggctgcccacagaatagcttcttccatgtttggccaacagcagatagcctaggactggagcgaggagaggaaaaggccttgttctctgaagtagtggtgccagcttcctgtagcactcaagacgtctgagcgggaagcaaatggttctcgaagcaagcaaggctgtttggaggccctaccctcagtctgaggagaacataccaggtccctccccagcaagaatgtctcaccttgacacaagcccagcttccctcccctctgccccagaccctagaataagacaggacaagtaactggttgagcacagggtactttattgatggtacatgacaaggtgcggctccctaggcccctcccctcttcaaggggtctacatggcaactgtgaggaggggagattcagtgtggtgggggactgagtgtggcagggactccccagcagtgagggtctctctcttcctcttgtgctcttgctggggctggtggtccargggtcttactccttggaggccatgtgggcmatgaggtccaycaccctgttgctgtagccaaattcgttgtcatacctagaagatgaaaagagttgtcagggccctttttctgagccagccaccagagggcgccagaccctgcactttttaagagccagtctctggccccagccacataccaggaaatgagcttgacaaagtggtcgttgagggcaatgccagccccagcgtcraagrtggaggagtgggtgtcgctgttgaagtmagaggagaccacctggtgctcagtgtagcccargaygcccttgarggggccctccgacgcctgcttcaccaccttcttgatgtcatcatatttggcaggkttttctagacggcaggtcaggtccaccactgacacgttggcagtggggacacggaaggccatgccagtgagcttcccgttcagctcagggatgaccttgcccacagccttggcagcgccagtagaggcagggatgatgttctggagagccccgcggccatcacgccacagtttcccggaggggccatccacagtcttctgggtggcagtgatggcatggactgtggtctgcaaaaggagtgaggccctgcagcgtactccccacatcacccctctacctccctccccaccttgaaaggaaattatgggaaagccagtccccagaacccccaaccccagggttgcacgcagccccggcagggaggagccagtcttggatgagaaaggtgggagcctcagtcccattccccagctctcataccatgagtccttccacgataccaaagttgtcatggatgaccttggccaggggtgctaagcagttggtggtgcaggaggcattgctgcaaagaaagagggagcggggcgcaagtcaggggagcgtgtccatagggtgccaggctggccgcttctccacgggccctgccttcctcacctgatgatcttgaggctgttgtcatacttctcatggttcacacccatgacgaacatgggggcrtcagcagagggggcagagatgatgacccttttggctcccccctgcaaatgagcctacagcagagaagcagacagttatgaacccggstcctgcctttgcagggctgagtcagcttcccctcccgcgggccctcctgcactcaccccagccttctccatggtggtgaagacgccagtggactccacgacgtactcagcgccagcatcgccccacttgattttggagggatctcgcctatgggggtgggggggagatggggacaggaccatattgagggacacaaggttaccatatacccaagggagccacaccatcctagttgcctccccaaagcacatttcttccattctgtcttccactcactcctggaagatggtgatgggatttccattgatgacaagcttcccgttctcagccttgacggtgccatggaatttgccatgggtggaatcatattggaacatgtaaacctgggggaatacgtgagggtatgaaggggctgcccatcagccaggtggctcctcccacaccagctttggggctcaccatgtagcactcaccatgtagttgaggtcaatgaaggggtcattgatggcaacaatatccactttaccagagttaaaagcagccctggtgaccaggcgcccaatacgaccaaatctaagagacaagaggcaagaaggcatgaggaggggaggctcctccagaatatgtgagcagccctaggccacctccccattaagagggcgaatgcagcatctccttacccccaggagggcccaagaggttgaattttatctcccttgagcttccctgccaggctggcctggcttaaggcatggctgcaactgaaggctccagggctgcccaacacccccagtcatacgaagcccttccaggagaagcggccatgtggggcactgccacccacagtctgggcacaagctttgtacatggtattcaccaccccactatgccaccccaggaatgcttgctgctgcctagctcagctgcaccctttagggagaaaacgcttgtacactcagcatcatcaaactcaaagggcaggagtaaaggtcagaaattaactggacagggcaagcccaccccttctctaagtccctcctacaaaagggacagagactggggcgggtgggaagaggggaagctgtattttaaccccctagtcccagggctttgatttgccaagttgcctgtccttcctagctcttttccagaaatcaggagtgggagcacaggtaagtgcatgtgtgtggggagaagggatgggagagagccccagcccaggcccccagctacagaaaggtcagcagctatatttaacctcagaccagggtgcggtgggagatctggtttccggaagacggaatggggagaagggcaggttccccgaggcgcccagacacccaatcctcccggtgacatttacagcctggcctttggggtcgggtcaacgctaggctggcaggggaagggcggggccgtgaggtgagccggcgctgcaggaaggggccaccaccagaggggccattttgcggtggaaatgtccttttccaactacccatgactcagcttctcccggcttggcaccatgccacagccaccacacctctgcggggaggggacacaagaggacctccataaacccacttctttgatttaccagagaataatctaggaaaagcatcacccggaggagaaatcgggccagctagcctcgctccacctgacttccccgccacacgcgactccacccatcgaggcaggagcgcagggttagtcaccggcaggctttcctaacggctgcccattcatttccttcccggttgcaacatggcggccgctctaccgcaggcgcagcatccggacagggatgcacccgctgcgcactagcatcccggggcctgcggtgccggaggccgtgggggaggggctcctctgcgacacgtgaccccgcagagcgcgaaaggaaagaaagcgtcccccacctaggggtccgggtcgggatctcgggcgggagtagggacctcctgtttctggggactaggggaaggaggctccgggcagatggcgccgcaagggcggagctgcacagggcgccacagcctgggtgcggggctccgccaggtccgagcgctgaccttgagctctccttgcggggaacagctaccctgcccccatacgactgcaaagacccggagcccgcaaggctcgtagacgcggttcgggggcggtcgcagcccagggccccccagccacccgcgaactcacccgttgactccgaccttcaccttccccatggtgtctgagcgatgtggctcggctgcgcggagggagagaacagtgagcgcctagtggccccggccgacacacacgcctcccctcccctcccccaccaggcctccatgcccagcccgcgccgcatcacgtcctccgcccgcccctgcaatgcggaggccgcccgggcccaccccgcagcggcgcgaacacatccggcctgcgcccgcccctgccgccttcaggccgtccctagcctcccgggtttctctccgcccgtcttcacctggcgacgcaaaagaagatgcggctgactgtcgaacaggaggagcagagagcgaagcgggaggctgcgggctcaatttatagaaaccgggggcgcggcggcaggcggtgactcggaccccgcctcccgccaggctcagccagtcccagcccaaggtcttgaggcctgagctacgtgcgcccgtaaaaccgctagtagccgggccctactttctccccgcttttttttttccgcagccgcctggttcaactgggcacgcaccgagcgtgtgggccccgacgtaggggggaagggactgagattggcccgatgggaggtgatcggtgctggttcccaggactggactgtgggcagcaggacactagggagtcaaggacggggacccttacacgcttggatgaaacaggaggactttgggaacgactgagatggggaattggagccggagcccagcaccgctcgcggctgcacgcggcctgccccctcccctttctttctttcaaaggctgagaggcgggaaagttggggaacttctcctcgaggctctgcggtagtgacaccggactgctcaggcaaaggcctaggaggggcccatgggcctcgggcgggggcccgtggttccttcccagcccccacttccccctccccatctcctggctcctggcatctctgggaccgaggcctgggctgggcactgggcactgggcactgggggcctggagaggaaggaggctcgggaggcggcttgagggggagggggaggtttctgcacggaaggtcacgatgtcctgcagccctgtagcctggacctgataattagggcagacaatcccggccctgtgtgcaccagcggctctctccgggctggggccccaggcggaggacaggatggctggtgggggcccagaggcctcccacaaaggcactcctggaaacctgtgggctgtgctgcctagggagagagacagtgtgcctttcattccatccagcctggggcgaagagcgggacgtgagggcggaagtccctccccgccctgggacgtgcaggcgagccaggagccagggactccctttcactggctgcgccgggggatattgagggcagggtgagtcaagaagagggaaaaagtgggaaaagaggtcttgggcacacggtgggaacaggtcccctgccccctcccacaggggatccattcttctggtaggagggcagagggccaggtttgtgagtgtgggatgggagggtgctgaacacttgtaaggaagggggtggggtggggtggccttggcccatcagcaggtgcatgggagggggatcccgggcctctttgctggcccagcataacctgacaccagccccctgcccttctagctaaaagccggttgctaagtttagcctgcctggtgataatctttgcttaaaaagcacccacaggactccagtccctgaccctgcctttctgggattgcctttcctgctgggacccagagccaggctgtgtcctcgtctggctgccactggcatggttggtgcgggcttttcacaatgaccacccagagcagagtagcaagagcaaggcaagaaggtccctaatggtgaaaggggtggggtgggggagtggaggaagccccacctctgactcagctattcctgcaaccaggaccgttaaccctttctcattgagagcattaagagcacctccatgctcctgcaccacccaagcgtgatcttcccctctgcctcatgcttgtcatttttcattactgtcttctccccgcaaagagggagctcagtgcccagggagcactactgacgtagtgtgctgttgtcatgacagcagaggcaccagtgtggtcacgacagccagctcacagcctccggttcgaaggtgactcagcagagaagacttgaggagctggagaggggtgcgcaggcttcagggggcagcccgcctgcagcatagctcacgccctctgcagacccgggaacaatgaggaatgctgggagacaggtcttgtctcctgcagagctggaggggatcatgatctgaacttccacgagcctgggccggtctgctgccaacctttggagatgggattagggaacacgagtgggggtggggtgaggcacacggcagaaagcaacccttggtctagagcaggttttctcaactgtgacgctattgacattgtgggccgtgtgattctttgttgaggggccatcctgtgcactgcaggatgttgagccacatccctggcctcttcccacaaatgctggtagcattcttcccctataggctatgacaacaaaacaggccccaggtgttgtcagatgtcctctggcagacaaaattgcccccggttcagaagcactgatctggagcctaggcactgcataattctccccagagaggctgtctggtcactgtgcagggtccagaggttgagaggggaaaggtggcagtgacggggcaggaagctcatctgccatcccgggacaggccctaggactctgggctcactcatctctctctgcactgataaccctctctctgctgcatgaaactgggctaatgtgaaagatgaaacaaagacaagcttaggaaaaaatgtctaaaagtatataaaaacatttattcattagaaaacaaggagattggcaaacatatattccaaagttgaagcagctcaacgcagttcagttaggctaatttaagagaaagccttgcattttaaagagcgtgtaggcattttttttttaatttgagatggaggttcgctattgttgcccaagctggagtgcaatggtgtgatttcggctcactacaacctccgcctctgggttcaggcgattctcctgcctcagcctcttgagtagctgggattacaggcgcacgccaatacgcccggctaattttttatttttagtagagatggggtttctccatgttggtcaggctggtctcgaactccctacctcaggttatccacccgccttggtatcgcaaagtgctgggattacaggcgtgagccacagtgcccggcctttttttttttttaaaaaaagagacagacaaatattttacaagggaaacagaattcgaattccaggtcaccctacaggataccctgcacagggaggacaggaacagacttcctaggatctgtgcctgcgagccgatgctctgagaatgggagttgttttcttgggtgtctcgtcttctgtcatctctgctgaaagatctatgcaaagaattaaaggaataagaaaaagctgagtcacaaagatggtgaaaaaatagatatcagagaacaagtgagacaatcccacaccgcacagaagaaataaaatccaagctgtacaggagaggcccttctgcggcagtggggcagagcatctacactcaggcccccgcagcaggtcctatggaaaccagccctctgcaccctagctgtgtgccttctcggccgggaacaggcgggagcatcataccttcctcactggactcatcacttgagaagacaactttgggtttctttttggaagctcgctgctgggtgtttggatgccgacgggtagtacggcggggctctggtgtgacaaagtcattgtctgaggctgtagaagccagaggctggtacctagaacctagaaaaggcaggaaaacgtgatttaaaaaagaagaagaaacaaatcactgcaggaggggagggcccagtctggtctcgcccgcacaggctgccttacgtaccagtggatggtttcttggctgatggcgctctctggctacctgcttggccaatctcaagctccttgattccatccaaacctctggtatgacaggcccgaagcttctgctcaaattcatctattatagcctggagggagaaaaggagattcagagcaggcctgaaaacagttacttctgattaaaaagaaacaaggccatggaagacatggaggccttaaacgcacattactaagaagccaaggtgagaaggctccataccggatcattccaatgatacattctggaaaagacaaagtgatggcaacagtaaaaagatcaggggttgtg

SEQ ID NO: 94500 - DNA, 93685 bp, Homo sapiens
  misc_feature (1)...(93685): n = A,T,C or G
nnnnnnnnnnnnnnnnnnnnnnnnnnnnnnnnnnnnnnnnnnnnnnnnnnnnnnnnnnnnnnnnnnnnnnnnnnnnnnnnnnnnnnnnnnnnnnnnnnnnnnnnnnnnnnnnnnnnnnnnnnnnnnnnnnnnnnnnnnnnnnnnnnnnnnnnnnnnnnnnnnnnnnnnnnnnnnnnnnnnnnnnnnnnnnnnnnnnnnnnnnnnnnnnnnnnnnnnnnnnnnnnnnnnnnnnnnnnnnnnnnnnnnnnnnnnnnnnnnnnnnnnnnnnnnnnnnnnnnnnnnnnnnnnnnnnnnnnnnnnnnnnnnnnnnnnnnnnnnnnnnnnnnnnnnnnnnnnnnnnnnnnnnnnnnnnnnnnnnnnnnnnnnnnnnnnnnnnnnnnnnnnnnnnnnnnnnnnnnnnnnnnnnnnnnnnnnnnnnnnnnnnnnnnnnnnnnnnnnnnnnnnnnnnnnnnnnnnnnnnnnnnnnnnnnnnnnnnnnnnnnnnnnnnnnnnnnnnnnnnnnnnnnnnnnnnnnnnnnnnnnnnnnnnnnnnnnnnnnnnnnnnnnnnnnnnnnnnnnnnnnnnnnnnnnnnnnnnnnnnnnnnnnnnnnnnnnnnnnnnnnnnnnnnnnnnnnnnnnnnnnnnnnnnnnnnnnnnnnnnnnnnnnnnnnnnnnnnnnnnnnnnnnnnnnnnnnnnnnnnnnnnnnnnnnnnnnnnnnnnnnnnnnnnnnnnnnnnnnnnnnnnnnnnnnnnnnnnnnnnnnnnnnnnnnnnnnnnnnnnnnnnnnnnnnnnnnnnnnnnnnnnnnnnnnnnnnnnnnnnnnnnnnnnnnnnnnnnnnnnnnnnnnnnnnnnnnnnnnnnnnnnnnnnnnnnnnnnnnnnnnnnnnnnnnnnnnnnnnnnnnnnnnnnnnnnnnnnnnnnnnnnnnnnnnnnnnnnnnnnnnnnnnnnnnnnnnnnnnnnnnnnnnnnnnnnnnnnnnnnnnnnnnnnnnnnnnnnnnnnnnnnnnnnnnnnnnnnnnnnnnnnnnnnnnnnnnnnnnnnnnnnnnnnnnnnnnnnnnnnnnnnnnnnnnnnnnnnnnnnnnnnnnnnnnnnnnnnnnnnnnnnnnnnnnnnnnnnnnnnnnnnnnnnnnnnnnnnnnnnnnnnnnnnnnnnnnnnnnnnnnnnnnnnnnnnnnnnnnnnnnnnnnnnnnnnnnnnnnnnnnnnnnnnnnnnnnnnnnnnnnnnnnnnnnnnnnnnnnnnnnnnnnnnnnnnnnnnnnnnnnnnnnnnnnnnnnnnnnnnnnnnnnnnnnnnnnnnnnnnnnnnnnnnnnnnnnnnnnnnnnnnnnnnnnnnnnnnnnnnnnnnnnnnnnnnnnnnnnnnnnnnnnnnnnnnnnnnnnnnnnnnnnnnnnnnnnnnnnnnnnnnnnnnnnnnnnnnnnnnnnnnnnnnnnnnnnnnnnnnnnnnnnnnnnnnnnnnnnnnnnnnnnnnnnnnnnnnnnnnnnnnnnnnnnnnnnnnnnnnnnnnnnnnnnnnnnnnnnnnnnnnnnnnnnnnnnnnnnnnnnnnnnnnnnnnnnnnnnnnnnnnnnnnnnnnnnnnnnnnnnnnnnnnnnnnnnnnnnnnnnnnnnnnnnnnnnnnnnnnnnnnnnnnnnnnnnnnnnnnnnnnnnnnnnnnnnnnnnnnnnnnnnnnnnnnnnnnnnnnnnnnnnnnnnnnnnnnnnnnnnnnnnnnnnnnnnnnnnnnnnnnnnnnnnnnnnnnnnnnnnnnnnnnnnnnnnnnnnnnnnnnnnnnnnnnnnnnnnnnnnnnnnnnnnnnnnnnnnnnnnnnnnnnnnnnnnnnnnnnnnnnnnnnnnnnnnnnnnnnnnnnnnnnnnnnnnnnnnnnnnnnnnnnnnnnnnnnnnnnnnnnnnnnnnnnnnnnnnnnnnnnnnnnnnnnnnnnnnnnnnnnnnnnnnnnnnnnnnnnnnnnnnnnnnnnnnnnnnnnnnnnnnnnnnnnnnnnnnnnnnnnnnnnnnnnnnnnnnnnnnnnnnnnnnnnnnnnnnnnnnnnnnnnnnnnnnnnnnnnnnnnnnnnnnnnnnnnnnnnnnnnnnnnnnnnnnnnnnnnnnnnnnnnnnnnnnnnnnnnnnnnnnnnnnnnnnnnnnnnnnnnnnnnnnnnnnnnnnnnnnnnnnnnnnnnnnnnnnnnnnnnnnnnnnnnnnnnnnnnnnnnnnnnnnnnnnnnnnnnnnnnnnnnnnnnnnnnnnnnnnnnnnnnnnnnnnnnnnnnnnnnnnnnnnnnnnnnnnnnnnnnnnnnnnnnnnnnnnnnnnnnnnnnnnnnnnnnnnnnnnnnnnnnnnnnnnnnnnnnnnnnnnnnnnnnnnnnnnnnnnnnnnnnnnnnnnnnnnnnnnnnnnnnnnnnnnnnnnnnnnnnnnnnnnnnnnnnnnnnnnnnnnnnnnnnnnnnnnnnnnnnnnnnnnnnnnnnnnnnnnnnnnnnnnnnnnnnnnnnnnnnnnnnnnnnnnnnnnnnnnnnnnnnnnnnnnnnnnnnnnnnnnnnnnnnnnnnnnnnnnnnnnnnnnnnnnnnnnnnnnnnnnnnnnnnnnnnnnnnnnnnnnnnnnnnnnnnnnnnnnnnnnnnnnnnnnnnnnnnnnnnnnnnnnnnnnnnnnnnnnnnnnnnnnnnnnnnnnnnnnnnnnnnnnnnnnnnnnnnnnnnnnnnnnnnnnnnnnnnnnnnnnnnnnnnnnnnnnnnnnnnnnnnnnnnnnnnnnnnnnnnnnnnnnnnnnnnnnnnnnnnnnnnnnnnnnnnnnnnnnnnnnnnnnnnnnnnnnnnnnnnnnnnnnnnnnnnnnnnnnnnnnnnnnnnnnnnnnnnnnnnnnnnnnnnnnnnnnnnnnnnnnnnnnnnnnnnnnnnnnnnnnnnnnnnnnnnnnnnnnnnnnnnnnnnnnnnnnnnnnnnnnnnnnnnnnnnnnnnnnnnnnnnnnnnnnnnnnnnnnnnnnnnnnnnnnnnnnnnnnnnnnnnnnnnnnnnnnnnnnnnnnnnnnnnnnnnnnnnnnnnnnnnnnnnnnnnnnnnnnnnnnnnnnnnnnnnnnnnnnnnnnnnnnnnnnnnnnnnnnnnnnnnnnnnnnnnnnnnnnnnnnnnnnnnnnnnnnnnnnnnnnnnnnnnnnnnnnnnnnnnnnnnnnnnnnnnnnnnnnnnnnnnnnnnnnnnnnnnnnnnnnnnnnnnnnnnnnnnnnnnnnnnnnnnnnnnnnnnnnnnnnnnnnnnnnnnnnnnnnnnnnnnnnnnnnnnnnnnnnnnnnnnnnnnnnnnnnnnnnnnnnnnnnnnnnnnnnnnnnnnnnnnnnnnnnnnnnnnnnnnnnnnnnnnnnnnnnnnnnnnnnnnnnnnnnnnnnnnnnnnnnnnnnnnnnnnnnnnnnnnnnnnnnnnnnnnnnnnnnnnnnnnnnnnnnnnnnnnnnnnnnnnnnnnnnnnnnnnnnnnnnnnnnnnnnnnnnnnnnnnnnnnnnnnnnnnnnnnnnnnnnnnnnnnnnnnnnnnnnnnnnnnnnnnnnnnnnnnnnnnnnnnnnnnnnnnnnnnnnnnnnnnnnnnnnnnnnnnnnnnnnnnnnnnnnnnnnnnnnnnnnnnnnnnnnnnnnnnnnnnnnnnnnnnnnnnnnnnnnnnnnnnnnnnnnnnnnnnnnnnnnnnnnnnnnnnnnnnnnnnnnnnnnnnnnnnnnnnnnnnnnnnnnnnnnnnnnnnnnnnnnnnnnnnnnnnnnnnnnnnnnnnnnnnnnnnnnnnnnnnnnnnnnnnnnnnnnnnnnnnnnnnnnnnnnnnnnnnnnnnnnnnnnnnnnnnnnnnnnnnnnnnnnnnnnnnnnnnnnnnnnnnnnnnnnnnnnnnnnnnnnnnnnnnnnnnnnnnnnnnnnnnnnnnnnnnnnnnnnnnnnnnnnnnnnnnnnnnnnnnnnnnnnnnnnnnnnnnnnnnnnnnnnnnnnnnnnnnnnnnnnnnnnnnnnnnnnnnnnnnnnnnnnnnnnnnnnnnnnnnnnnnnnnnnnnnnnnnnnnnnnnnnnnnnnnnnnnnnnnnnnnnnnnnnnnnnnnnnnnnnnnnnnnnnnnnnnnnnnnnnnnnnnnnnnnnnnnnnnnnnnnnnnnnnnnnnnnnnnnnnnnnnnnnnnnnnnnnnnnnnnnnnnnnnnnnnnnnnnnnnnnnnnnnnnnnnnnnnnnnnnnnnnnnnnnnnnnnnnnnnnnnnnnnnnnnnnnnnnnnnnnnnnnnnnnnnnnnnnnnnnnnnnnnnnnnnnnnnnnnnnnnnnnnnnnnnnnnnnnnnnnnnnnnnnnnnnnnnnnnnnnnnnnnnnnnnnnnnnnnnnnnnnnnnnnnnnnnnnnnnnnnnnnnnnnnnnnnnnnnnnnnnnnnnnnnnnnnnnnnnnnnnnnnnnnnnnnnnnnnnnnnnnnnnnnnnnnnnnnnnnnnnnnnnnnnnnnnnnnnnnnnnnnnnnnnnnnnnnnnnnnnnnnnnnnnnnnnnnnnnnnnnnnnnnnnnnnnnnnnnnnnnnnnnnnnnnnnnnnnnnnnnnnnnnnnnnnnnnnnnnnnnnnnnnnnnnnnnnnnnnnnnnnnnnnnnnnnnnnnnnnnnnnnnnnnnnnnnnnnnnnnnnnnnnnnnnnnnnnnnnnnnnnnnnnnnnnnnnnnnnnnnnnnnnnnnnnnnnnnnnnnnnnnnnnnnnnnnnnnnnnnnnnnnnnnnnnnnnnnnnnnnnnnnnnnnnnnnnnnnnnnnnnnnnnnnnnnnnnnnnnnnnnnnnnnnnnnnnnnnnnnnnnnnnnnnnnnnnnnnnnnnnnnnnnnnnnnnnnnnnnnnnnnnnnnnnnnnnnnnnnnnnnnnnnnnnnnnnnnnnnnnnnnnnnnnnnnnnnnnnnnnnnnnnnnnnnnnnnnnnnnnnnctttttaggagcccctatctcctggtcttctcttacctcccaagctaccctgcttctttgaaaagtttgcaggcctgtctacctcttctcagcttgctctgcatgccttggggaagctgcataaagcatggatcatgaaggaggggggcggaggagagggaaatgcatgtttgcacaaatggaccctgagcccaccaggcaggctccagatagggaaaaaaaaaaaaaaaaaaacccttacattatcatgtgacttgcgcaagaaaacaccccaccccaccccacccactcccaggaggaagctggcagccctgagggatttaaccactcactgacttcaactcttcctgcatactcatttaggcgatgacattcttggtctgtaggtttaggtggccacatccactgggatgacagatgccaggtacaacatatcaggtacaggcacatatcaggccccgtgacaggcattttacacattctccttctgagaggtctgtgcatgtctccctggttagtggcaaactgcgatgagacctcatggtcatcccggttagacacgtccctgtctgtgctgctcaagccagaccctcgaagcccaaatgaggagcagaagtgtagcaagggagccctccccttttgaagccgttccagtggtactttttactgccgagctggcagatgttggactgggacaggagtgaggggtgggggcagggtgttgcaggacccagcccctgaatgtgatgtgtgagcctgtgagcccctgcttcctggtcccagtgggttcctgccaccttcagctgcagcctccccctcgaacctgcagctccgtatctgaatcagcctgtcattccctgcctacaggtttcgatcctacagggccttggctttctgggcagcatttgatgtgaagcgcccttaccacctactccttggggtggacccacccctggcacccaggactccttgcctcccaatgactgagccccctgggctttccttccttgtttctttccttcaaatctattatcagtttttacttttgtgttcttcaaaggcctttttggttgcagtttgagtaagagaggctgacctcctgctgcttgctgggaatggactctggctgggggaaagttccctgcccattcatctggctgccatctgtctcttcaggtgtcatgtgattctctgagggagcagctgcgtgagtggagatgctttcagtggtggagaatggactggacccccaggctgccatcccggtaggtgggtgagggaggatcaagggcggggaagggctgcaggggacagttgtatcannnnnnnnnnnnnnnnnnnnnnnnnnnnnnnnnnnnnnnnnnnnnnnnnnnnnnnnnnnnnnnnnnnnnnnnnnnnnnnnnnnnnnnnnnnnnnnnnnnnnnnnnnnnnnnnnnnnnnnnnnnnnnnnnnnnnnnnnnnnnnnnnnnnnnnnnnnnnnnnnnnnnnnnnnnnnnnnnnnnnnnnnnnnnnnnnnnnnnnnnnnnnnnnnnnnnnnnnnnnnnnnnnnnnnnnnnnnnnnnnnnnnnnnnnnnnnnnnnnnnnnnnnnnnnnnnnnnnnnnnnnnnnnnnnnnnnnnnnnnnnnnnnnnnnnnnnnnnnnnnnnnnnnnnnnnnnnnnnnnnnnnnnnnnnnnnnnnnnnnnnnnnnnnnnnnnnnnnnnnnnnnnnnnnnnnnnnnnnnnnnnnnnnnnnnnnnnnnnnnnnnnnnnnnnnnnnnnnnnnnnnnnnnnnnnnnnnnnnnnnnnnnnnnnnnnnnnnnnnnnnnnnnnnnnnnnnnnnnnnnnnnnnnnnnnnnnnnnnnnnnnnnnnnnnnnnnnnnnnnnnnnnnnnnnnnnnnnnnnnnnnnnnnnnnnnnnnnnnnnnnnnnnnnnnnnnnnnnnnnnnnnnnnnnnnnnnnnnnnnnnnnnnnnnnnnnnnnnnnnnnnnnnnnnnnnnnnnnnnnnnnnnnnnnnnnnnnnnnnnnnnnnnnnnnnnnnnnnnnnnnnnnnnnnnnnnnnnnnnnnnnnnnnnnnnnnnnnnnnnnnnnnnnnnnnnnnnnnnnnnnnnnnnnnnnnnnnnnnnnnnnnnnnnnnnnnnnnnnnnnnnnnnnnnnnnnnnnnnnnnnnnnnnnnnnnnnnnnnnnnnnnnnnnnnnnnnnnnnnnnnnnnnnnnnnnnnnnnnnnnnnnnnnnnnnnnnnnnnnnnnnnnnnnnnnnnnnnnnnnnnnnnnnnnnnnnnnnnnnnnnnnnnnnnnnnnnnnnnnnnnnnnnnnnnnnnnnnnnnnnnnnnnnnnnnnnnnnnnnnnnnnnnnnnnnnnnnnnnnnnnnnnnnnnnnnnnnnnnnnnnnnnnnnnnnnnnnnnnnnnnnnnnnnnnnnnnnnnnnnnnnnnnnnnnnnnnnnnnnnnnnnnnnnnnnnnnnnnnnnnnnnnnnnnnnnnnnnnnnnnnnnnnnnnnnnnnnnnnnnnnnnnnnnnnnnnnnnnnnnnnnnnnnnnnnnnnnnnnnnnnnnnnnnnnnnnnnnnnnnnnnnnnnnnnnnnnnnnnnnnnnnnnnnnnnnnnnnnnnnnnnnnnnnnnnnnnnnnnnnnnnnnnnnnnnnnnnnnnnnnnnnnnnnnnnnnnnnnnnnnnnnnnnnnnnnnnnnnnnnnnnnnnnnnnnnnnnnnnnnnnnnnnnnnnnnnnnnnnnnnnnnnnnnnnnnnnnnnnnnnnnnnnnnnnnnnnnnnnnnnnnnnnnnnnnnnnnnnnnnnnnnnnnnnnnnnnnnnnnnnnnnnnnnnnnnnnnnnnnnnnnnnnnnnnnnnnnnnnnnnnnnnnnnnnnnnnnnnnnnnnnnnnnnnnnnnnnnnnnnnnnnnnnnnnnnnnnnnnnnnnnnnnnnnnnnnnnnnnnnnnnnnnnnnnnnnnnnnnnnnnnnnnnnnnnnnnnnnnnnnnnnnnnnnnnnnnnnnnnnnnnnnnnnnnnnnnnnnnnnnnnnnnnnnnnnnnnnnnnnnnnnnnnnnnnnnnnnnnnnnnnnnnnnnnnnnnnnnnnnnnnnnnnnnnnnnnnnnnnnnnnnnnnnnnnnnnnnnnnnnnnnnnnnnnnnnnnnnnnnnnnnnnnnnnnnnnnnnnnnnnnnnnnnnnnnnnnnnnnnnnnnnnnnnnnnnnnnnnnnnnnnnnnnnnnnnnnnnnnnnnnnnnnnnnnnnnnnnnnnnnnnnnnnnnnnnnnnnnnnnnnnnnnnnnnnnnnnnnnnnnnnnnnnnnnnnnnnnnnnnnnnnnnnnnnnnnnnnnnnnnnnnnnnnnnnnnnnnnnnnnnnnnnnnnnnnnnnnnnnnnnnnnnnnnnnnnnnnnnnnnnnnnnnnnnnnnnnnnnnnnnnnnnnnnnnnnnnnnnnnnnnnnnnnnnnnnnnnnnnnnnnnnnnnnnnnnnnnnnnnnnnnnnnnnnnnnnnnnnnnnnnnnnnnnnnnnnnnnnnnnnnnnnnnnnnnnnnnnnnnnnnnnnnnnnnnnnnnnnnnnnnnnnnnnnnnnnnnnnnnnnnnnnnnnnnnnnnnnnnnnnnnnnnnnnnnnnnnnnnnnnnnnnnnnnnnnnnnnnnnnnnnnnnnnnnnnnnnnnnnnnnnnnnnnnnnnnnnnnnnnnnnnnnnnnnnnnnnnnnnnnnnnnnnnnnnnnnnnnnnnnnnnnnnnnnnnnnnnnnnnnnnnnnnnnnnnnnnnnnnnnnnnnnnnnnnnnnnnnnnnnnnnnnnnnnnnnnnnnnnnnnnnnnnnnnnnnnnnnnnnnnnnnnnnnnnnnnnnnnnnnnnnnnnnnnnnnnnnnnnnnnnnnnnnnnnnnnnnnnnnnnnnnnnnnnnnnnnnnnnnnnnnnnnnnnnnnnnnnnnnnnnnnnnnnnnnnnnnnnnnnnnnnnnnnnnnnnnnnnnnnnnnnnnnnnnnnnnnnnnnnnnnnnnnnnnnnnnnnnnnnnnnnnnnnnnnnnnnnnnnnnnnnnnnnnnnnnnnnnnnnnnnnnnnnnnnnnnnnnnnnnnnnnnnnnnnnnnnnnnnnnnnnnnnnnnnnnnnnnnnnnnnnnnnnnnnnnnnnnnnnnnnnnnnnnnnnnnnnnnnnnnnnnnnnnnnnnnnnnnnnnnnnnnnnnnnnnnnnnnnnnnnnnnnnnnnnnnnnnnnnnnnnnnnnnnnnnnnnnnnnnnnnnnnnnnnnnnnnnnnnnnnnnnnnnnnnnnnnnnnnnnnnnnnnnnnnnnnnnnnnnnnnnnnnnnnnnnnnnnnnnnnnnnnnnnnnnnnnnnnnnnnnnnnnnnnnnnnnnnnnnnnnnnnnnnnnnnnnnnnnnnnnnnnnnnnnnnnnnnnnnnnnnnnnnnnnnnnnnnnnnnnnnnnnnnnnnnnnnnnnnnnnnnnnnnnnnnnnnnnnnnnnnnnnnnnnnnnnnnnnnnnnnnnnnnnnnnnnnnnnnnnnnnnnnnnnnnnnnnnnnnnnnnnnnnnnnnnnnnnnnnnnnnnnnnnnnnnnnnnnnnnnnnnnnnnnnnnnnnnnnnnnnnnnnnnnnnnnnnnnnnnnnnnnnnnnnnnnnnnnnnnnnnnnnnnnnnnnnnnnnnnnnnnnnnnnnnnnnnnnnnnnnnnnnnnnnnnnnnnnnnnnnnnnnnnnnnnnnnnnnnnnnnnnnnnnnnnnnnnnnnnnnnnnnnnnnnnnnnnnnnnnnnnnnnnnnnnnnnnnnnnnnnnnnnnnnnnnnnnnnnnnnnnnnnnnnnnnnnnnnnnnnnnnnnnnnnnnnnnnnnnnnnnnnnnnnnnnnnnnnnnnnnnnnnnnnnnnnnnnnnnnnnnnnnnnnnnnnnnnnnnnnnnnnnnnnnnnnnnnnnnnnnnnnnnnnnnnnnnnnnnnnnnnnnnnnnnnnnnnnnnnnnnnnnnnnnnnnnnnnnnnnnnnnnnnnnnnnnnnnnnnnnnnnnnnnnnnnnnnnnnnnnnnnnnnnnnnnnnnnnnnnnnnnnnnnnnnnnnnnnnnnnnnnnnnnnnnnnnnnnnnnnnnnnnnnnnnnnnnnnnnnnnnnnnnnnnnnnnnnnnnnnnnnnnnnnnnnnnnnnnnnnnnnnnnnnnnnnnnnnnnnnnnnnnnnnnnnnnnnnnnnnnnnnnnnnnnnnnnnnnnnnnnnnnnnnnnnnnnnnnnnnnnnnnnnnnnnnnnnnnnnnnnnnnnnnnnnnnnnnnnnnnnnnnnnnnnnnnnnnnnnnnnnnnnnnnnnnnnnnnnnnnnnnnnnnnnnnnnnnnnnnnnnnnnnnnnnnnnnnnnnnnnnnnnnnnnnnnnnnnnnnnnnnnnnnnnnnnnnnnnnnnnnnnnnnnnnnnnnnnnnnnnnnnnnnnnnnnnnnnnnnnnnnnnnnnnnnnnnnnnnnnnnnnnnnnnnnnnnnnnnnnnnnnnnnnnnnnnnnnnnnnnnnnnnnnnnnnnnnnnnnnnnnnnnnnnnnnnnnnnnnnnnnnnnnnnnnnnnnnnnnnnnnnnnnnnnnnnnnnnnnnnnnnnnnnnnnnnnnnnnnnnnnnnnnnnnnnnnnnnnnnnnnnnnnnnnnnnnnnnnnnnnnnnnnnnnnnnnnnnnnnnnnnnnnnnnnnnnnnnnnnnnnnnnnnnnnnnnnnnnnnnnnnnnnnnnnnnnnnnnnnnnnnnnnnnnnnnnnnnnnnnnnnnnnnnnnnnnnnnnnnnnnnnnnnnnnnnnnnnnnnnnnnnnnnnnnnnnnnnnnnnnnnnnnnnnnnnnnnnnnnnnnnnnnnnnnnnnnnnnnnnnnnnnnnnnnnnnnnnnnnnnnnnnnnnnnnnnnnnnnnnnnnnnnnnnnnnnnnnnnnnnnnnnnnnnnnnnnnnnnnnnnnnnnnnnnnnnnnnnnnnnnnnnnnnnnnnnnnnnnnnnnnnnnnnnnnnnnnnnnnnnnnnnnnnnnnnnnnnnnnnnnnnnnnnnnnnnnnnnnnnnnnnnnnnnnnnnnnnnnnnnnnnnnnnnnnnnnnnnnnnnnnnnnnnnnnnnnnnnnnnnnnnnnnnnnnnnnnnnnnnnnnnnnnnnnnnnnnnnnnnnnnnnnnnnnnnnnnnnnnnnnnnnnnnnnnnnnnnnnnnnnnnnnnnnnnnnnnnnnnnnnnnnnnnnnnnnnnnnnnnnnnnnnnnnnnnnnnnnnnnnnnnnnnnnnnnnnnnnnnnnnnnnnnnnnnnnnnnnnnnnnnnnnnnnnnnnnnnnnnnnnnnnnnnnnnnnnnnnnnnnnnnnnnnnnnnnnnnnnnnnnnnnnnnnnnnnnnnnnnnnnnnnnnnnnnnnnnnnnnnnnnnnnnnnnnnnnnnnnnnnnnnnnnnnnnnnnnnnnnnnnnnnnnnnnnnnnnnnnnnnnnnnnnnnnnnnnnnnnnnnnnnnnnnnnnnnnnnnnnnnnnnnnnnnnnnnnnnnnnnnnnnnnnnnnnnnnnnnnnnnnnnnnnnnnnnnnnnnnnnnnnnnnnnnnnnnnnnnnnnnnnnnnnnnnnnnnnnnnnnnnnnnnnnnnnnnnnnnnnnnnnnnnnnnnnnnnnnnnnnnnnnnnnnnnnnnnnnnnnnnnnnnnnnnnnnnnnnnnnnnnnnnnnnnnnnnnnnnnnnnnnnnnnnnnnnnnnnnnnnnnnnnnnnnnnnnnnnnnnnnnnnnnnnnnnnnnnnnnnnnnnnnnnnnnnnnnnnnnnnnnnnnnnnnnnnnnnnnnnnnnnnnnnnnnnnnnnnnnnnnnnnnnnnnnnnnnnnnnnnnnnnnnnnnnnnnnnnnnnnnnnnnnnnnnnnnnnnnnnnnnnnnnnnnnnnnnnnnnnnnnnnnnnnnnnnnnnnnnnnnnnnnnnnnnnnnnnnnnnnnnnnnnnnnnnnnnnnnnnnnnnnnnnnnnnnnnnnnnnnnnnnnnnnnnnnnnnnnnnnnnnnnnnnnnnnnnnnnnnnnnnnnnnnnnnnnnnnnnnnnnnnnnnnnnnnnnnnnnnnnnnnnnnnnnnnnnnnnnnnnnnnnnnnnnnnnnnnnnnnnnnnnnnnnnnnnnnnnnnnnnnnnnnnnnnnnnnnnnnnnnnnnnnnnnnnnnnnnnnnnnnnnnnnnnnnnnnnnnnnnnnnnnnnnnnnnnnnnnnnnnnnnnnnnnnnnnnnnnnnnnnnnnnnnnnnnnnnnnnnnnnnnnnnnnnnnnnnnnnnnnnnnnnnnnnnnnnnnnnnnnnnnnnnnnnnnnnnnnnnnnnnnnnnnnnnnnnnnnnnnnnnnnnnnnnnnnnnnnnnnnnnnnnnnnnnnnnnnnnnnnnnnnnnnnnnnnnnnnnnnnnnnnnnnnnnnnnnnnnnnnnnnnnnnnnnnnnnnnnnnnnnnnnnnnnnnnnnnnnnnnnnnnnnnnnnnnnnnnnnnnnnnnnnnnnnnnnnnnnnnnnnnnnnnnnnnnnnnnnnnnnnnnnnnnnnnnnnnnnnnnnnnnnnnnnnnnnnnnnnnnnnnnnnnnnnnnnnnnnnnnnnnnnnnnnnnnnnnnnnnnnnnnnnnnnnnnnnnnnnnnnnnnnnnnnnnnnnnnnnnnnnnnnnnnnnnnnnnnnnnnnnnnnnnnnnnnnnnnnnnnnnnnnnnnnnnnnnnnnnnnnnnnnnnnnnnnnnnnnnnnnnnnnnnnnnnnnnnnnnnnnnnnnnnnnnnnnnnnnnnnnnnnnnnnnnnnnnnnnnnnnnnnnnnnnnnnnnnnnnnnnnnnnnnnnnnnnnnnnnnnnnnnnnnnnnnnnnnnnnnnnnnnnnnnnnnnnnnnnnnnnnnnnnnnnnnnnnnnnnnnnnnnnnnnnnnnnnnnnnnnnnnnnnnnnnnnnnnnnnnnnnnnnnnnnnnnnnnnnnnnnnnnnnnnnnnnnnnnnnnnnnnnnnnnnnnnnnnnnnnnnnnnnnnnnnnnnnnnnnnnnnnnnnnnnnnnnnnnnnnnnnnnnnnnnnnnnnnnnnnnnnnnnnnnnnnnnnnnnnnnnnnnnnnnnnnnnnnnnnnnnnnnnnnnnnnnnnnnnnnnnnnnnnnnnnnnnnnnnnnnnnnnnnnnnnnnnnnnnnnnnnnnnnnnnnnnnnnnnnnnnnnnnnnnnnnnnnnnnnnnnnnnnnnnnnnnnnnnnnnnnnnnnnnnnnnnnnnnnnnnnnnnnnnnnnnnnnnnnnnnnnnnnnnnnnnnnnnnnnnnnnnnnnnnnnnnnnnnnnnnnnnnnnnnnnnnnnnnnnnnnnnnnnnnnnnnnnnnnnnnnnnnnnnnnnnnnnnnnnnnnnnnnnnnnnnnnnnnnnnnnnnnnnnnnnnnnnnnnnnnnnnnnnnnnnnnnnnnnnnnnnnnnnnnnnnnnnnnnnnnnnnnnnnnnnnnnnnnnnnnnnnnnnnnnnnnnnnnnnnnnnnnnnnnnnnnnnnnnnnnnnnnnnnnnnnnnnnnnnnnnnnnnnnnnnnnnnnnnnnnnnnnnnnnnnnnnnnnnnnnnnnnnnnnnnnnnnnnnnnnnnnnnnnnnnnnnnnnnnnnnnnnnnnnnnnnnnnnnnnnnnnnnnnnnnnnnnnnnnnnnnnnnnnnnnnnnnnnnnnnnnnnnnnnnnnnnnnnnnnnnnnnnnnnnnnnnnnnnnnnnnnnnnnnnnnnnnnnnnnnnnnnnnnnnnnnnnnnnnnnnnnnnnnnnnnnnnnnnnnnnnnnnnnnnnnnnnnnnnnnnnnnnnnnnnnnnnnnnnnnnnnnnnnnnnnnnnnnnnnnnnnnnnnnnnnnnnnnnnnnnnnnnnnnnnnnnnnnnnnnnnnnnnnnnnnnnnnnnnnnnnnnnnnnnnnnnnnnnnnnnnnnnnnnnnnnnnnnnnnnnnnnnnnnnnnnnnnnnnnnnnnnnnnnnnnnnnnnnnnnnnnnnnnnnnnnnnnnnnnnnnnnnnnnnnnnnnnnnnnnnnnnnnnnnnnnnnnnnnnnnnnnnnnnnnnnnnnnnnnnnnnnnnnnnnnnnnnnnnnnnnnnnnnnnnnnnnnnnnnnnnnnnnnnnnnnnnnnnnnnnnnnnnnnnnnnnnnnnnnnnnnnnnnnnnnnnnnnnnnnnnnnnnnnnnnnnnnnnnnnnnnnnnnnnnnnnnnnnnnnnnnnnnnnnnnnnnnnnnnnnnnnnnnnnnnnnnnnnnnnnnnnnnnnnnnnnnnnnnnnnnnnnnnnnnnnnnnnnnnnnnnnnnnnnnnnnnnnnnnnnnnnnnnnnnnnnnnnnnnnnnnnnnnnnnnnnnnnnnnnnnnnnnnnnnnnnnnnnnnnnnnnnnnnnnnnnnnnnnnnnnnnnnnnnnnnnnnnnnnnnnnnnnnnnnnnnnnnnnnnnnnnnnnnnnnnnnnnnnnnnnnnnnnnnnnnnnnnnnnnnnnnnnnnnnnnnnnnnnnnnnnnnnnnnnnnnnnnnnnnnnnnnnnnnnnnnnnnnnnnnnnnnnnnnnnnnnnnnnnnnnnnnnnnnnnnnnnnnnnnnnnnnnnnnnnnnnnnnnnnnnnnnnnnnnnnnnnnnnnnnnnnnnnnnnnnnnnnnnnnnnnnnnnnnnnnnnnnnnnnnnnnnnnnnnnnnnnnnnnnnnnnnnnnnnnnnnnnnnnnnnnnnnnnnnnnnnnnnnnnnnnnnnnnnnnnnnnnnnnnnnnnnnnnnnnnnnnnnnnnnnnnnnnnnnnnnnnnnnnnnnnnnnnnnnnnnnnnnnnnnnnnnnnnnnnnnnnnnnnnnnnnnnnnnnnnnnnnnnnnnnnnnnnnnnnnnnnnnnnnnnnnnnnnnnnnnnnnnnnnnnnnnnnnnnnnnnnnnnnnnnnnnnnnnnnnnnnnnnnnnnnnnnnnnnnnnnnnnnnnnnnnnnnnnnnnnnnnnnnnnnnnnnnnnnnnnnnnnnnnnnnnnnnnnnnnnnnnnnnnnnnnnnnnnnnnnnnnnnnnnnnnnnnnnnnnnnnnnnnnnnnnnnnnnnnnnnnnnnnnnnnnnnnnnnnnnnnnnnnnnnnnnnnnnnnnnnnnnnnnnnnnnnnnnnnnnnnnnnnnnnnnnnnnnnnnnnnnnnnnnnnnnnnnnnnnnnnnnnnnnnnnnnnnnnnnnnnnnnnnnnnnnnnnnnnnnnnnnnnnnnnnnnnnnnnnnnnnnnnnnnnnnnnnnnnnnnnnnnnnnnnnnnnnnnnnnnnnnnnnnnnnnnnnnnnnnnnnnnnnnnnnnnnnnnnnnnnnnnnnnnnnnnnnnnnnnnnnnnnnnnnnnnnnnnnnnnnnnnnnnnnnnnnnnnnnnnnnnnnnnnnnnnnnnnnnnnnnnnnnnnnnnnnnnnnnnnnnnnnnnnnnnnnnnnnnnnnnnnnnnnnnnnnnnnnnnnnnnnnnnnnnnnnnnnnnnnnnnnnnnnnnnnnnnnnnnnnnnnnnnnnnnnnnnnnnnnnnnnnnnnnnnnnnnnnnnnnnnnnnnnnnnnnnnnnnnnnnnnnnnnnnnnnnnnnnnnnnnnnnnnnnnnnnnnnnnnnnnnnnnnnnnnnnnnnnnnnnnnnnnnnnnnnnnnnnnnnnnnnnnnnnnnnnnnnnnnnnnnnnnnnnnnnnnnnnnnnnnnnnnnnnnnnnnnnnnnnnnnnnnnnnnnnnnnnnnnnnnnnnnnnnnnnnnnnnnnnnnnnnnnnnnnnnnnnnnnnnnnnnnnnnnnnnnnnnnnnnnnnnnnnnnnnnnnnnnnnnnnnnnnnnnnnnnnnnnnnnnnnnnnnnnnnnnnnnnnnnnnnnnnnnnnnnnnnnnnnnnnnnnnnnnnnnnnnnnnnnnnnnnnnnnnnnnnnnnnnnnnnnnnnnnnnnnnnnnnnnnnnnnnnnnnnnnnnnnnnnnnnnnnnnnnnnnnnnnnnnnnnnnnnnnnnnnnnnnnnnnnnnnnnnnnnnnnnnnnnnnnnnnnnnnnnnnnnnnnnnnnnnnnnnnnnnnnnnnnnnnnnnnnnnnnnnnnnnnnnnnnnnnnnnnnnnnnnnnnnnnnnnnnnnnnnnnnnnnnnnnnnnnnnnnnnnnnnnnnnnnnnnnnnnnnnnnnnnnnnnnnnnnnnnnnnnnnnnnnnnnnnnnnnnnnnnnnnnnnnnnnnnnnnnnnnnnnnnnnnnnnnnnnnnnnnnnnnnnnnnnnnnnnnnnnnnnnnnnnnnnnnnnnnnnnnnnnnnnnnnnnnnnnnnnnnnnnnnnnnnnnnnnnnnnnnnnnnnnnnnnnnnnnnnnnnnnnnnnnnnnnnnnnnnnnnnnnnnnnnnnnnnnnnnnnnnnnnnnnnnnnnnnnnnnnnnnnnnnnnnnnnnnnnnnnnnnnnnnnnnnnnnnnnnnnnnnnnnnnnnnnnnnnnnnnnnnnnnnnnnnnnnnnnnnnnnnnnnnnnnnnnnnnnnnnnnnnnnnnnnnnnnnnnnnnnnnnnnnnnnnnnnnnnnnnnnnnnnnnnnnnnnnnnnnnnnnnnnnnnnnnnnnnnnnnnnnnnnnnnnnnnnnnnnnnnnnnnnnnnnnnnnnnnnnnnnnnnnnnnnnnnnnnnnnnnnnnnnnnnnnnnnnnnnnnnnnnnnnnnnnnnnnnnnnnnnnnnnnnnnnnnnnnnnnnnnnnnnnnnnnnnnnnnnnnnnnnnnnnnnnnnnnnnnnnnnnnnnnnnnnnnnnnnnnnnnnnnnnnnnnnnnnnnnnnnnnnnnnnnnnnnnnnnnnnnnnnnnnnnnnnnnnnnnnnnnnnnnnnnnnnnnnnnnnnnnnnnnnnnnnnnnnnnnnnnnnnnnnnnnnnnnnnnnnnnnnnnnnnnnnnnnnnnnnnnnnnnnnnnnnnnnnnnnnnnnnnnnnnnnnnnnnnnnnnnnnnnnnnnnnnnnnnnnnnnnnnnnnnnnnnnnnnnnnnnnnnnnnnnnnnnnnnnnnnnnnnnnnnnnnnnnnnnnnnnnnnnnnnnnnnnnnnnnnnnnnnnnnnnnnnnnnnnnnnnnnnnnnnnnnnnnnnnnnnnnnnnnnnnnnnnnnnnnnnnnnnnnnnnnnnnnnnnnnnnnnnnnnnnnnnnnnnnnnnnnnnnnnnnnnnnnnnnnnnnnnnnnnnnnnnnnnnnnnnnnnnnnnnnnnnnnnnnnnnnnnnnnnnnnnnnnnnnnnnnnnnnnnnnnnnnnnnnnnnnnnnnnnnnnnnnnnnnnnnnnnnnnnnnnnnnnnnnnnnnnnnnnnnnnnnnnnnnnnnnnnnnnnnnnnnnnnnnnnnnnnnnnnnnnnnnnnnnnnnnnnnnnnnnnnnnnnnnnnnnnnnnnnnnnnnnnnnnnnnnnnnnnnnnnnnnnnnnnnnnnnnnnnnnnnnnnnnnnnnnnnnnnnnnnnnnnnnnnnnnnnnnnnnnnnnnnnnnnnnnnnnnnnnnnnnnnnnnnnnnnnnnnnnnnnnnnnnnnnnnnnnnnnnnnnnnnnnnnnnnnnnnnnnnnnnnnnnnnnnnnnnnnnnnnnnnnnnnnnnnnnnnnnnnnnnnnnnnnnnnnnnnnnnnnnnnnnnnnnnnnnnnnnnnnnnnnnnnnnnnnnnnnnnnnnnnnnnnnnnnnnnnnnnnnnnnnnnnnnnnnnnnnnnnnnnnnnnnnnnnnnnnnnnnnnnnnnnnnnnnnnnnnnnnnnnnnnnnnnnnnnnnnnnnnnnnnnnnnnnnnnnnnnnnnnnnnnnnnnnnnnnnnnnnnnnnnnnnnnnnnnnnnnnnnnnnnnnnnnnnnnnnnnnnnnnnnnnnnnnnnnnnnnnnnnnnnnnnnnnnnnnnnnnnnnnnnnnnnnnnnnnnnnnnnnnnnnnnnnnnnnnnnnnnnnnnnnnnnnnnnnnnnnnnnnnnnnnnnnnnnnnnnnnnnnnnnnnnnnnnnnnnnnnnnnnnnnnnnnnnnnnnnnnnnnnnnnnnnnnnnnnnnnnnnnnnnnnnnnnnnnnnnnnnnnnnnnnnnnnnnnnnnnnnnnnnnnnnnnnnnnnnnnnnnnnnnnnnnnnnnnnnnnnnnnnnnnnnnnnnnnnnnnnnnnnnnnnnnnnnnnnnnnnnnnnnnnnnnnnnnnnnnnnnnnnnnnnnnnnnnnnnnnnnnnnnnnnnnnnnnnnnnnnnnnnnnnnnnnnnnnnnnnnnnnnnnnnnnnnnnnnnnnnnnnnnnnnnnnnnnnnnnnnnnnnnnnnnnnnnnnnnnnnnnnnnnnnnnnnnnnnnnnnnnnnnnnnnnnnnnnnnnnnnnnnnnnnnnnnnnnnnnnnnnnnnnnnnnnnnnnnnnnnnnnnnnnnnnnnnnnnnnnnnnnnnnnnnnnnnnnnnnnnnnnnnnnnnnnnnnnnnnnnnnnnnnnnnnnnnnnnnnnnnnnnnnnnnnnnnnnnnnnnnnnnnnnnnnnnnnnnnnnnnnnnnnnnnnnnnnnnnnnnnnnnnnnnnnnnnnnnnnnnnnnnnnnnnnnnnnnnnnnnnnnnnnnnnnnnnnnnnnnnnnnnnnnnnnnnnnnnnnnnnnnnnnnnnnnnnnnnnnnnnnnnnnnnnnnnnnnnnnnnnnnnnnnnnnnnnnnnnnnnnnnnnnnnnnnnnnnnnnnnnnnnnnnnnnnnnnnnnnnnnnnnnnnnnnnnnnnnnnnnnnnnnnnnnnnnnnnnnnnnnnnnnnnnnnnnnnnnnnnnnnnnnnnnnnnnnnnnnnnnnnnnnnnnnnnnnnnnnnnnnnnnnnnnnnnnnnnnnnnnnnnnnnnnnnnnnnnnnnnnnnnnnnnnnnnnnnnnnnnnnnnnnnnnnnnnnnnnnnnnnnnnnnnnnnnnnnnnnnnnnnnnnnnnnnnnnnnnnnnnnnnnnnnnnnnnnnnnnnnnnnnnnnnnnnnnnnnnnnnnnnnnnnnnnnnnnnnnnnnnnnnnnnnnnnnnnnnnnnnnnnnnnnnnnnnnnnnnnnnnnnnnnnnnnnnnnnnnnnnnnnnnnnnnnnnnnnnnnnnnnnnnnnnnnnnnnnnnnnnnnnnnnnnnnnnnnnnnnnnnnnnnnnnnnnnnnnnnnnnnnnnnnnnnnnnnnnnnnnnnnnnnnnnnnnnnnnnnnnnnnnnnnnnnnnnnnnnnnnnnnnnnnnnnnnnnnnnnnnnnnnnnnnnnnnnnnnnnnnnnnnnnnnnnnnnnnnnnnnnnnnnnnnnnnnnnnnnnnnnnnnnnnnnnnnnnnnnnnnnnnnnnnnnnnnnnnnnnnnnnnnnnnnnnnnnnnnnnnnnnnnnnnnnnnnnnnnnnnnnnnnnnnnnnnnnnnnnnnnnnnnnnnnnnnnnnnnnnnnnnnnnnnnnnnnnnnnnnnnnnnnnnnnnnnnnnnnnnnnnnnnnnnnnnnnnnnnnnnnnnnnnnnnnnnnnnnnnnnnnnnnnnnnnnnnnnnnnnnnnnnnnnnnnnnnnnnnnnnnnnnnnnnnnnnnnnnnnnnnnnnnnnnnnnnnnnnnnnnnnnnnnnnnnnnnnnnnnnnnnnnnnnnnnnnnnnnnnnnnnnnnnnnnnnnnnnnnnnnnnnnnnnnnnnnnnnnnnnnnnnnnnnnnnnnnnnnnnnnnnnnnnnnnnnnnnnnnnnnnnnnnnnnnnnnnnnnnnnnnnnnnnnnnnnnnnnnnnnnnnnnnnnnnnnnnnnnnnnnnnnnnnnnnnnnnnnnnnnnnnnnnnnnnnnnnnnnnnnnnnnnnnnnnnnnnnnnnnnnnnnnnnnnnnnnnnnnnnnnnnnnnnnnnnnnnnnnnnnnnnnnnnnnnnnnnnnnnnnnnnnnnnnnnnnnnnnnnnnnnnnnnnnnnnnnnnnnnnnnnnnnnnnnnnnnnnnnnnnnnnnnnnnnnnnnnnnnnnnnnnnnnnnnnnnnnnnnnnnnnnnnnnnnnnnnnnnnnnnnnnnnnnnnnnnnnnnnnnnnnnnnnnnnnnnnnnnnnnnnnnnnnnnnnnnnnnnnnnnnnnnnnnnnnnnnnnnnnnnnnnnnnnnnnnnnnnnnnnnnnnnnnnnnnnnnnnnnnnnnnnnnnnnnnnnnnnnnnnnnnnnnnnnnnnnnnnnnnnnnnnnnnnnnnnnnnnnnnnnnnnnnnnnnnnnnnnnnnnnnnnnnnnnnnnnnnnnnnnnnnnnnnnnnnnnnnnnnnnnnnnnnnnnnnnnnnnnnnnnnnnnnnnnnnnnnnnnnnnnnnnnnnnnnnnnnnnnnnnnnnnnnnnnnnnnnnnnnnnnnnnnnnnnnnnnnnnnnnnnnnnnnnnnnnnnnnnnnnnnnnnnnnnnnnnnnnnnnnnnnnnnnnnnnnnnnnnnnnnnnnnnnnnnnnnnnnnnnnnnnnnnnnnnnnnnnnnnnnnnnnnnnnnnnnnnnnnnnnnnnnnnnnnnnnnnnnnnnnnnnnnnnnnnnnnnnnnnnnnnnnnnnnnnnnnnnnnnnnnnnnnnnnnnnnnnnnnnnnnnnnnnnnnnnnnnnnnnnnnnnnnnnnnnnnnnnnnnnnnnnnnnnnnnnnnnnnnnnnnnnnnnnnnnnnnnnnnnnnnnnnnnnnnnnnnnnnnnnnnnnnnnnnnnnnnnnnnnnnnnnnnnnnnnnnnnnnnnnnnnnnnnnnnnnnnnnnnnnnnnnnnnnnnnnnnnnnnnnnnnnnnnnnnnnnnnnnnnnnnnnnnnnnnnnnnnnnnnnnnnnnnnnnnnnnnnnnnnnnnnnnnnnnnnnnnnnnnnnnnnnnnnnnnnnnnnnnnnnnnnnnnnnnnnnnnnnnnnnnnnnnnnnnnnnnnnnnnnnnnnnnnnnnnnnnnnnnnnnnnnnnnnnnnnnnnnnnnnnnnnnnnnnnnnnnnnnnnnnnnnnnnnnnnnnnnnnnnnnnnnnnnnnnnnnnnnnnnnnnnnnnnnnnnnnnnnnnnnnnnnnnnnnnnnnnnnnnnnnnnnnnnnnnnnnnnnnnnnnnnnnnnnnnnnnnnnnnnnnnnnnnnnnnnnnnnnnnnnnnnnnnnnnnnnnnnnnnnnnnnnnnnnnnnnnnnnnnnnnnnnnnnnnnnnnnnnnnnnnnnnnnnnnnnnnnnnnnnnnnnnnnnnnnnnnnnnnnnnnnnnnnnnnnnnnnnnnnnnnnnnnnnnnnnnnnnnnnnnnnnnnnnnnnnnnnnnnnnnnnnnnnnnnnnnnnnnnnnnnnnnnnnnnnnnnnnnnnnnnnnnnnnnnnnnnnnnnnnnnnnnnnnnnnnnnnnnnnnnnnnnnnnnnnnnnnnnnnnnnnnnnnnnnnnnnnnnnnnnnnnnnnnnnnnnnnnnnnnnnnnnnnnnnnnnnnnnnnnnnnnnnnnnnnnnnnnnnnnnnnnnnnnnnnnnnnnnnnnnnnnnnnnnnnnnnnnnnnnnnnnnnnnnnnnnnnnnnnnnnnnnnnnnnnnnnnnnnnnnnnnnnnnnnnnnnnnnnnnnnnnnnnnnnnnnnnnnnnnnnnnnnnnnnnnnnnnnnnnnnnnnnnnnnnnnnnnnnnnnnnnnnnnnnnnnnnnnnnnnnnnnnnnnnnnnnnnnnnnnnnnnnnnnnnnnnnnnnnnnnnnnnnnnnnnnnnnnnnnnnnnnnnnnnnnnnnnnnnnnnnnnnnnnnnnnnnnnnnnnnnnnnnnnnnnnnnnnnnnnnnnnnnnnnnnnnnnnnnnnnnnnnnnnnnnnnnnnnnnnnnnnnnnnnnnnnnnnnnnnnnnnnnnnnnnnnnnnnnnnnnnnnnnnnnnnnnnnnnnnnnnnnnnnnnnnnnnnnnnnnnnnnnnnnnnnnnnnnnnnnnnnnnnnnnnnnnnnnnnnnnnnnnnnnnnnnnnnnnnnnnnnnnnnnnnnnnnnnnnnnnnnnnnnnnnnnnnnnnnnnnnnnnnnnnnnnnnnnnnnnnnnnnnnnnnnnnnnnnnnnnnnnnnnnnnnnnnnnnnnnnnnnnnnnnnnnnnnnnnnnnnnnnnnnnnnnnnnnnnnnnnnnnnnnnnnnnnnnnnnnnnnnnnnnnnnnnnnnnnnnnnnnnnnnnnnnnnnnnnnnnnnnnnnnnnnnnnnnnnnnnnnnnnnnnnnnnnnnnnnnnnnnnnnnnnnnnnnnnnnnnnnnnnnnnnnnnnnnnnnnnnnnnnnnnnnnnnnnnnnnnnnnnnnnnnnnnnnnnnnnnnnnnnnnnnnnnnnnnnnnnnnnnnnnnnnnnnnnnnnnnnnnnnnnnnnnnnnnnnnnnnnnnnnnnnnnnnnnnnnnnnnnnnnnnnnnnnnnnnnnnnnnnnnnnnnnnnnnnnnnnnnnnnnnnnnnnnnnnnnnnnnnnnnnnnnnnnnnnnnnnnnnnnnnnnnnnnnnnnnnnnnnnnnnnnnnnnnnnnnnnnnnnnnnnnnnnnnnnnnnnnnnnnnnnnnnnnnnnnnnnnnnnnnnnnnnnnnnnnnnnnnnnnnnnnnnnnnnnnnnnnnnnnnnnnnnnnnnnnnnnnnnnnnnnnnnnnnnnnnnnnnnnnnnnnnnnnnnnnnnnnnnnnnnnnnnnnnnnnnnnnnnnnnnnnnnnnnnnnnnnnnnnnnnnnnnnnnnnnnnnnnnnnnnnnnnnnnnnnnnnnnnnnnnnnnnnnnnnnnnnnnnnnnnnnnnnnnnnnnnnnnnnnnnnnnnnnnnnnnnnnnnnnnnnnnnnnnnnnnnnnnnnnnnnnnnnnnnnnnnnnnnnnnnnnnnnnnnnnnnnnnnnnnnnnnnnnnnnnnnnnnnnnnnnnnnnnnnnnnnnnnnnnnnnnnnnnnnnnnnnnnnnnnnnnnnnnnnnnnnnnnnnnnnnnnnnnnnnnnnnnnnnnnnnnnnnnnnnnnnnnnnnnnnnnnnnnnnnnnnnnnnnnnnnnnnnnnnnnnnnnnnnnnnnnnnnnnnnnnnnnnnnnnnnnnnnnnnnnnnnnnnnnnnnnnnnnnnnnnnnnnnnnnnnnnnnnnnnnnnnnnnnnnnnnnnnnnnnnnnnnnnnnnnnnnnnnnnnnnnnnnnnnnnnnnnnnnnnnnnnnnnnnnnnnnnnnnnnnnnnnnnnnnnnnnnnnnnnnnnnnnnnnnnnnnnnnnnnnnnnnnnnnnnnnnnnnnnnnnnnnnnnnnnnnnnnnnnnnnnnnnnnnnnnnnnnnnnnnnnnnnnnnnnnnnnnnnnnnnnnnnnnnnnnnnnnnnnnnnnnnnnnnnnnnnnnnnnnnnnnnnnnnnnnnnnnnnnnnnnnnnnnnnnnnnnnnnnnnnnnnnnnnnnnnnnnnnnnnnnnnnnnnnnnnnnnnnnnnnnnnnnnnnnnnnnnnnnnnnnnnnnnnnnnnnnnnnnnnnnnnnnnnnnnnnnnnnnnnnnnnnnnnnnnnnnnnnnnnnnnnnnnnnnnnnnnnnnnnnnnnnnnnnnnnnnnnnnnnnnnnnnnnnnnnnnnnnnnnnnnnnnnnnnnnnnnnnnnnnnnnnnnnnnnnnnnnnnnnnnnnnnnnnnnnnnnnnnnnnnnnnnnnnnnnnnnnnnnnnnnnnnnnnnnnnnnnnnnnnnnnnnnnnnnnnnnnnnnnnnnnnnnnnnnnnnnnnnnnnnnnnnnnnnnnnnnnnnnnnnnnnnnnnnnnnnnnnnnnnnnnnnnnnnnnnnnnnnnnnnnnnnnnnnnnnnnnnnnnnnnnnnnnnnnnnnnnnnnnnnnnnnnnnnnnnnnnnnnnnnnnnnnnnnnnnnnnnnnnnnnnnnnnnnnnnnnnnnnnnnnnnnnnnnnnnnnnnnnnnnnnnnnnnnnnnnnnnnnnnnnnnnnnnnnnnnnnnnnnnnnnnnnnnnnnnnnnnnnnnnnnnnnnnnnnnnnnnnnnnnnnnnnnnnnnnnnnnnnnnnnnnnnnnnnnnnnnnnnnnnnnnnnnnnnnnnnnnnnnnnnnnnnnnnnnnnnnnnnnnnnnnnnnnnnnnnnnnnnnnnnnnnnnnnnnnnnnnnnnnnnnnnnnnnnnnnnnnnnnnnnnnnnnnnnnnnnnnnnnnnnnnnnnnnnnnnnnnnnnnnnnnnnnnnnnnnnnnnnnnnnnnnnnnnnnnnnnnnnnnnnnnnnnnnnnnnnnnnnnnnnnnnnnnnnnnnnnnnnnnnnnnnnnnnnnnnnnnnnnnnnnnnnnnnnnnnnnnnnnnnnnnnnnnnnnnnnnnnnnnnnnnnnnnnnnnnnnnnnnnnnnnnnnnnnnnnnnnnnnnnnnnnnnnnnnnnnnnnnnnnnnnnnnnnnnnnnnnnnnnnnnnnnnnnnnnnnnnnnnnnnnnnnnnnnnnnnnnnnnnnnnnnnnnnnnnnnnnnnnnnnnnnnnnnnnnnnnnnnnnnnnnnnnnnnnnnnnnnnnnnnnnnnnnnnnnnnnnnnnnnnnnnnnnnnnnnnnnnnnnnnnnnnnnnnnnnnnnnnnnnnnnnnnnnnnnnnnnnnnnnnnnnnnnnnnnnnnnnnnnnnnnnnnnnnnnnnnnnnnnnnnnnnnnnnnnnnnnnnnnnnnnnnnnnnnnnnnnnnnnnnnnnnnnnnnnnnnnnnnnnnnnnnnnnnnnnnnnnnnnnnnnnnnnnnnnnnnnnnnnnnnnnnnnnnnnnnnnnnnnnnnnnnnnnnnnnnnnnnnnnnnnnnnnnnnnnnnnnnnnnnnnnnnnnnnnnnnnnnnnnnnnnnnnnnnnnnnnnnnnnnnnnnnnnnnnnnnnnnnnnnnnnnnnnnnnnnnnnnnnnnnnnnnnnnnnnnnnnnnnnnnnnnnnnnnnnnnnnnnnnnnnnnnnnnnnnnnnnnnnnnnnnnnnnnnnnnnnnnnnnnnnnnnnnnnnnnnnnnnnnnnnnnnnnnnnnnnnnnnnnnnnnnnnnnnnnnnnnnnnnnnnnnnnnnnnnnnnnnnnnnnnnnnnnnnnnnnnnnnnnnnnnnnnnnnnnnnnnnnnnnnnnnnnnnnnnnnnnnnnnnnnnnnnnnnnnnnnnnnnnnnnnnnnnnnnnnnnnnnnnnnnnnnnnnnnnnnnnnnnnnnnnnnnnnnnnnnnnnnnnnnnnnnnnnnnnnnnnnnnnnnnnnnnnnnnnnnnnnnnnnnnnnnnnnnnnnnnnnnnnnnnnnnnnnnnnnnnnnnnnnnnnnnnnnnnnnnnnnnnnnnnnnnnnnnnnnnnnnnnnnnnnnnnnnnnnnnnnnnnnnnnnnnnnnnnnnnnnnnnnnnnnnnnnnnnnnnnnnnnnnnnnnnnnnnnnnnnnnnnnnnnnnnnnnnnnnnnnnnnnnnnnnnnnnnnnnnnnnnnnnnnnnnnnnnnnnnnnnnnnnnnnnnnnnnnnnnnnnnnnnnnnnnnnnnnnnnnnnnnnnnnnnnnnnnnnnnnnnnnnnnnnnnnnnnnnnnnnnnnnnnnnnnnnnnnnnnnnnnnnnnnnnnnnnnnnnnnnnnnnnnnnnnnnnnnnnnnnnnnnnnnnnnnnnnnnnnnnnnnnnnnnnnnnnnnnnnnnnnnnnnnnnnnnnnnnnnnnnnnnnnnnnnnnnnnnnnnnnnnnnnnnnnnnnnnnnnnnnnnnnnnnnnnnnnnnnnnnnnnnnnnnnnnnnnnnnnnnnnnnnnnnnnnnnnnnnnnnnnnnnnnnnnnnnnnnnnnnnnnnnnnnnnnnnnnnnnnnnnnnnnnnnnnnnnnnnnnnnnnnnnnnnnnnnnnnnnnnnnnnnnnnnnnnnnnnnnnnnnnnnnnnnnnnnnnnnnnnnnnnnnnnnnnnnnnnnnnnnnnnnnnnnnnnnnnnnnnnnnnnnnnnnnnnnnnnnnnnnnnnnnnnnnnnnnnnnnnnnnnnnnnnnnnnnnnnnnnnnnnnnnnnnnnnnnnnnnnnnnnnnnnnnnnnnnnnnnnnnnnnnnnnnnnnnnnnnnnnnnnnnnnnnnnnnnnnnnnnnnnnnnnnnnnnnnnnnnnnnnnnnnnnnnnnnnnnnnnnnnnnnnnnnnnnnnnnnnnnnnnnnnnnnnnnnnnnnnnnnnnnnnnnnnnnnnnnnnnnnnnnnnnnnnnnnnnnnnnnnnnnnnnnnnnnnnnnnnnnnnnnnnnnnnnnnnnnnnnnnnnnnnnnnnnnnnnnnnnnnnnnnnnnnnnnnnnnnnnnnnnnnnnnnnnnnnnnnnnnnnnnnnnnnnnnnnnnnnnnnnnnnnnnnnnnnnnnnnnnnnnnnnnnnnnnnnnnnnnnnnnnnnnnnnnnnnnnnnnnnnnnnnnnnnnnnnnnnnnnnnnnnnnnnnnnnnnnnnnnnnnnnnnnnnnnnnnnnnnnnnnnnnnnnnnnnnnnnnnnnnnnnnnnnnnnnnnnnnnnnnnnnnnnnnnnnnnnnnnnnnnnnnnnnnnnnnnnnnnnnnnnnnnnnnnnnnnnnnnnnnnnnnnnnnnnnnnnnnnnnnnnnnnnnnnnnnnnnnnnnnnnnnnnnnnnnnnnnnnnnnnnnnnnnnnnnnnnnnnnnnnnnnnnnnnnnnnnnnnnnnnnnnnnnnnnnnnnnnnnnnnnnnnnnnnnnnnnnnnnnnnnnnnnnnnnnnnnnnnnnnnnnnnnnnnnnnnnnnnnnnnnnnnnnnnnnnnnnnnnnnnnnnnnnnnnnnnnnnnnnnnnnnnnnnnnnnnnnnnnnnnnnnnnnnnnnnnnnnnnnnnnnnnnnnnnnnnnnnnnnnnnnnnnnnnnnnnnnnnnnnnnnnnnnnnnnnnnnnnnnnnnnnnnnnnnnnnnnnnnnnnnnnnnnnnnnnnnnnnnnnnnnnnnnnnnnnnnnnnnnnnnnnnnnnnnnnnnnnnnnnnnnnnnnnnnnnnnnnnnnnnnnnnnnnnnnnnnnnnnnnnnnnnnnnnnnnnnnnnnnnnnnnnnnnnnnnnnnnnnnnnnnnnnnnnnnnnnnnnnnnnnnnnnnnnnnnnnnnnnnnnnnnnnnnnnnnnnnnnnnnnnnnnnnnnnnnnnnnnnnnnnnnnnnnnnnnnnnnnnnnnnnnnnnnnnnnnnnnnnnnnnnnnnnnnnnnnnnnnnnnnnnnnnnnnnnnnnnnnnnnnnnnnnnnnnnnnnnnnnnnnnnnnnnnnnnnnnnnnnnnnnnnnnnnnnnnnnnnnnnnnnnnnnnnnnnnnnnnnnnnnnnnnnnnnnnnnnnnnnnnnnnnnnnnnnnnnnnnnnnnnnnnnnnnnnnnnnnnnnnnnnnnnnnnnnnnnnnnnnnnnnnnnnnnnnnnnnnnnnnnnnnnnnnnnnnnnnnnnnnnnnnnnnnnnnnnnnnnnnnnnnnnnnnnnnnnnnnnnnnnnnnnnnnnnnnnnnnnnnnnnnnnnnnnnnnnnnnnnnnnnnnnnnnnnnnnnnnnnnnnnnnnnnnnnnnnnnnnnnnnnnnnnnnnnnnnnnnnnnnnnnnnnnnnnnnnnnnnnnnnnnnnnnnnnnnnnnnnnnnnnnnnnnnnnnnnnnnnnnnnnnnnnnnnnnnnnnnnnnnnnnnnnnnnnnnnnnnnnnnnnnnnnnnnnnnnnnnnnnnnnnnnnnnnnnnnnnnnnnnnnnnnnnnnnnnnnnnnnnnnnnnnnnnnnnnnnnnnnnnnnnnnnnnnnnnnnnnnnnnnnnnnnnnnnnnnnnnnnnnnnnnnnnnnnnnnnnnnnnnnnnnnnnnnnnnnnnnnnnnnnnnnnnnnnnnnnnnnnnnnnnnnnnnnnnnnnnnnnnnnnnnnnnnnnnnnnnnnnnnnnnnnnnnnnnnnnnnnnnnnnnnnnnnnnnnnnnnnnnnnnnnnnnnnnnnnnnnnnnnnnnnnnnnnnnnnnnnnnnnnnnnnnnnnnnnnnnnnnnnnnnnnnnnnnnnnnnnnnnnnnnnnnnnnnnnnnnnnnnnnnnnnnnnnnnnnnnnnnnnnnnnnnnnnnnnnnnnnnnnnnnnnnnnnnnnnnnnnnnnnnnnnnnnnnnnnnnnnnnnnnnnnnnnnnnnnnnnnnnnnnnnnnnnnnnnnnnnnnnnnnnnnnnnnnnnnnnnnnnnnnnnnnnnnnnnnnnnnnnnnnnnnnnnnnnnnnnnnnnnnnnnnnnnnnnnnnnnnnnnnnnnnnnnnnnnnnnnnnnnnnnnnnnnnnnnnnnnnnnnnnnnnnnnnnnnnnnnnnnnnnnnnnnnnnnnnnnnnnnnnnnnnnnnnnnnnnnnnnnnnnnnnnnnnnnnnnnnnnnnnnnnnnnnnnnnnnnnnnnnnnnnnnnnnnnnnnnnnnnnnnnnnnnnnnnnnnnnnnnnnnnnnnnnnnnnnnnnnnnnnnnnnnnnnnnnnnnnnnnnnnnnnnnnnnnnnnnnnnnnnnnnnnnnnnnnnnnnnnnnnnnnnnnnnnnnnnnnnnnnnnnnnnnnnnnnnnnnnnnnnnnnnnnnnnnnnnnnnnnnnnnnnnnnnnnnnnnnnnnnnnnnnnnnnnnnnnnnnnnnnnnnnnnnnnnnnnnnnnnnnnnnnnnnnnnnnnnnnnnnnnnnnnnnnnnnnnnnnnnnnnnnnnnnnnnnnnnnnnnnnnnnnnnnnnnnnnnnnnnnnnnnnnnnnnnnnnnnnnnnnnnnnnnnnnnnnnnnnnnnnnnnnnnnnnnnnnnnnnnnnnnnnnnnnnnnnnnnnnnnnnnnnnnnnnnnnnnnnnnnnnnnnnnnnnnnnnnnnnnnnnnnnnnnnnnnnnnnnnnnnnnnnnnnnnnnnnnnnnnnnnnnnnnnnnnnnnnnnnnnnnnnnnnnnnnnnnnnnnnnnnnnnnnnnnnnnnnnnnnnnnnnnnnnnnnnnnnnnnnnnnnnnnnnnnnnnnnnnnnnnnnnnnnnnnnnnnnnnnnnnnnnnnnnnnnnnnnnnnnnnnnnnnnnnnnnnnnnnnnnnnnnnnnnnnnnnnnnnnnnnnnnnnnnnnnnnnnnnnnnnnnnnnnnnnnnnnnnnnnnnnnnnnnnnnnnnnnnnnnnnnnnnnnnnnnnnnnnnnnnnnnnnnnnnnnnnnnnnnnnnnnnnnnnnnnnnnnnnnnnnnnnnnnnnnnnnnnnnnnnnnnnnnnnnnnnnnnnnnnnnnnnnnnnnnnnnnnnnnnnnnnnnnnnnnnnnnnnnnnnnnnnnnnnnnnnnnnnnnnnnnnnnnnnnnnnnnnnnnnnnnnnnnnnnnnnnnnnnnnnnnnnnnnnnnnnnnnnnnnnnnnnnnnnnnnnnnnnnnnnnnnnnnnnnnnnnnnnnnnnnnnnnnnnnnnnnnnnnnnnnnnnnnnnnnnnnnnnnnnnnnnnnnnnnnnnnnnnnnnnnnnnnnnnnnnnnnnnnnnnnnnnnnnnnnnnnnnnnnnnnnnnnnnnnnnnnnnnnnnnnnnnnnnnnnnnnnnnnnnnnnnnnnnnnnnnnnnnnnnnnnnnnnnnnnnnnnnnnnnnnnnnnnnnnnnnnnnnnnnnnnnnnnnnnnnnnnnnnnnnnnnnnnnnnnnnnnnnnnnnnnnnnnnnnnnnnnnnnnnnnnnnnnnnnnnnnnnnnnnnnnnnnnnnnnnnnnnnnnnnnnnnnnnnnnnnnnnnnnnnnnnnnnnnnnnnnnnnnnnnnnnnnnnnnnnnnnnnnnnnnnnnnnnnnnnnnnnnnnnnnnnnnnnnnnnnnnnnnnnnnnnnnnnnnnnnnnnnnnnnnnnnnnnnnnnnnnnnnnnnnnnnnnnnnnnnnnnnnnnnnnnnnnnnnnnnnnnnnnnnnnnnnnnnnnnnnnnnnnnnnnnnnnnnnnnnnnnnnnnnnnnnnnnnnnnnnnnnnnnnnnnnnnnnnnnnnnnnnnnnnnnnnnnnnnnnnnnnnnnnnnnnnnnnnnnnnnnnnnnnnnnnnnnnnnnnnnnnnnnnnnnnnnnnnnnnnnnnnnnnnnnnnnnnnnnnnnnnnnnnnnnnnnnnnnnnnnnnnnnnnnnnnnnnnnnnnnnnnnnnnnnnnnnnnnnnnnnnnnnnnnnnnnnnnnnnnnnnnnnnnnnnnnnnnnnnnnnnnnnnnnnnnnnnnnnnnnnnnnnnnnnnnnnnnnnnnnnnnnnnnnnnnnnnnnnnnnnnnnnnnnnnnnnnnnnnnnnnnnnnnnnnnnnnnnnnnnnnnnnnnnnnnnnnnnnnnnnnnnnnnnnnnnnnnnnnnnnnnnnnnnnnnnnnnnnnnnnnnnnnnnnnnnnnnnnnnnnnnnnnnnnnnnnnnnnnnnnnnnnnnnnnnnnnnnnnnnnnnnnnnnnnnnnnnnnnnnnnnnnnnnnnnnnnnnnnnnnnnnnnnnnnnnnnnnnnnnnnnnnnnnnnnnnnnnnnnnnnnnnnnnnnnnnnnnnnnnnnnnnnnnnnnnnnnnnnnnnnnnnnnnnnnnnnnnnnnnnnnnnnnnnnnnnnnnnnnnnnnnnnnnnnnnnnnnnnnnnnnnnnnnnnnnnnnnnnnnnnnnnnnnnnnnnnnnnnnnnnnnnnnnnnnnnnnnnnnnnnnnnnnnnnnnnnnnnnnnnnnnnnnnnnnnnnnnnnnnnnnnnnnnnnnnnnnnnnnnnnnnnnnnnnnnnnnnnnnnnnnnnnnnnnnnnnnnnnnnnnnnnnnnnnnnnnnnnnnnnnnnnnnnnnnnnnnnnnnnnnnnnnnnnnnnnnnnnnnnnnnnnnnnnnnnnnnnnnnnnnnnnnnnnnnnnnnnnnnnnnnnnnnnnnnnnnnnnnnnnnnnnnnnnnnnnnnnnnnnnnnnnnnnnnnnnnnnnnnnnnnnnnnnnnnnnnnnnnnnnnnnnnnnnnnnnnnnnnnnnnnnnnnnnnnnnnnnnnnnnnnnnnnnnnnnnnnnnnnnnnnnnnnnnnnnnnnnnnnnnnnnnnnnnnnnnnnnnnnnnnnnnnnnnnnnnnnnnnnnnnnnnnnnnnnnnnnnnnnnnnnnnnnnnnnnnnnnnnnnnnnnnnnnnnnnnnnnnnnnnnnnnnnnnnnnnnnnnnnnnnnnnnnnnnnnnnnnnnnnnnnnnnnnnnnnnnnnnnnnnnnnnnnnnnnnnnnnnnnnnnnnnnnnnnnnnnnnnnnnnnnnnnnnnnnnnnnnnnnnnnnnnnnnnnnnnnnnnnnnnnnnnnnnnnnnnnnnnnnnnnnnnnnnnnnnnnnnnnnnnnnnnnnnnnnnnnnnnnnnnnnnnnnnnnnnnnnnnnnnnnnnnnnnnnnnnnnnnnnnnnnnnnnnnnnnnnnnnnnnnnnnnnnnnnnnnnnnnnnnnnnnnnnnnnnnnnnnnnnnnnnnnnnnnnnnnnnnnnnnnnnnnnnnnnnnnnnnnnnnnnnnnnnnnnnnnnnnnnnnnnnnnnnnnnnnnnnnnnnnnnnnnnnnnnnnnnnnnnnnnnnnnnnnnnnnnnnnnnnnnnnnnnnnnnnnnnnnnnnnnnnnnnnnnnnnnnnnnnnnnnnnnnnnnnnnnnnnnnnnnnnnnnnnnnnnnnnnnnnnnnnnnnnnnnnnnnnnnnnnnnnnnnnnnnnnnnnnnnnnnnnnnnnnnnnnnnnnnnnnnnnnnnnnnnnnnnnnnnnnnnnnnnnnnnnnnnnnnnnnnnnnnnnnnnnnnnnnnnnnnnnnnnnnnnnnnnnnnnnnnnnnnnnnnnnnnnnnnnnnnnnnnnnnnnnnnnnnnnnnnnnnnnnnnnnnnnnnnnnnnnnnnnnnnnnnnnnnnnnnnnnnnnnnnnnnnnnnnnnnnnnnnnnnnnnnnnnnnnnnnnnnnnnnnnnnnnnnnnnnnnnnnnnnnnnnnnnnnnnnnnnnnnnnnnnnnnnnnnnnnnnnnnnnnnnnnnnnnnnnnnnnnnnnnnnnnnnnnnnnnnnnnnnnnnnnnnnnnnnnnnnnnnnnnnnnnnnnnnnnnnnnnnnnnnnnnnnnnnnnnnnnnnnnnnnnnnnnnnnnnnnnnnnnnnnnnnnnnnnnnnnnnnnnnnnnnnnnnnnnnnnnnnnnnnnnnnnnnnnnnnnnnnnnnnnnnnnnnnnnnnnnnnnnnnnnnnnnnnnnnnnnnnnnnnnnnnnnnnnnnnnnnnnnnnnnnnnnnnnnnnnnnnnnnnnnnnnnnnnnnnnnnnnnnnnnnnnnnnnnnnnnnnnnnnnnnnnnnnnnnnnnnnnnnnnnnnnnnnnnnnnnnnnnnnnnnnnnnnnnnnnnnnnnnnnnnnnnnnnnnnnnnnnnnnnnnnnnnnnnnnnnnnnnnnnnnnnnnnnnnnnnnnnnnnnnnnnnnnnnnnnnnnnnnnnnnnnnnnnnnnnnnnnnnnnnnnnnnnnnnnnnnnnnnnnnnnnnnnnnnnnnnnnnnnnnnnnnnnnnnnnnnnnnnnnnnnnnnnnnnnnnnnnnnnnnnnnnnnnnnnnnnnnnnnnnnnnnnnnnnnnnnnnnnnnnnnnnnnnnnnnnnnnnnnnnnnnnnnnnnnnnnnnnnnnnnnnnnnnnnnnnnnnnnnnnnnnnnnnnnnnnnnnnnnnnnnnnnnnnnnnnnnnnnnnnnnnnnnnnnnnnnnnnnnnnnnnnnnnnnnnnnnnnnnnnnnnnnnnnnnnnnnnnnnnnnnnnnnnnnnnnnnnnnnnnnnnnnnnnnnnnnnnnnnnnnnnnnnnnnnnnnnnnnnnnnnnnnnnnnnnnnnnnnnnnnnnnnnnnnnnnnnnnnnnnnnnnnnnnnnnnnnnnnnnnnnnnnnnnnnnnnnnnnnnnnnnnnnnnnnnnnnnnnnnnnnnnnnnnnnnnnnnnnnnnnnnnnnnnnnnnnnnnnnnnnnnnnnnnnnnnnnnnnnnnnnnnnnnnnnnnnnnnnnnnnnnnnnnnnnnnnnnnnnnnnnnnnnnnnnnnnnnnnnnnnnnnnnnnnnnnnnnnnnnnnnnnnnnnnnnnnnnnnnnnnnnnnnnnnnnnnnnnnnnnnnnnnnnnnnnnnnnnnnnnnnnnnnnnnnnnnnnnnnnnnnnnnnnnnnnnnnnnnnnnnnnnnnnnnnnnnnnnnnnnnnnnnnnnnnnnnnnnnnnnnnnnnnnnnnnnnnnnnnnnnnnnnnnnnnnnnnnnnnnnnnnnnnnnnnnnnnnnnnnnnnnnnnnnnnnnnnnnnnnnnnnnnnnnnnnnnnnnnnnnnnnnnnnnnnnnnnnnnnnnnnnnnnnnnnnnnnnnnnnnnnnnnnnnnnnnnnnnnnnnnnnnnnnnnnnnnnnnnnnnnnnnnnnnnnnnnnnnnnnnnnnnnnnnnnnnnnnnnnnnnnnnnnnnnnnnnnnnnnnnnnnnnnnnnnnnnnnnnnnnnnnnnnnnnnnnnnnnnnnnnnnnnnnnnnnnnnnnnnnnnnnnnnnnnnnnnnnnnnnnnnnnnnnnnnnnnnnnnnnnnnnnnnnnnnnnnnnnnnnnnnnnnnnnnnnnnnnnnnnnnnnnnnnnnnnnnnnnnnnnnnnnnnnnnnnnnnnnnnnnnnnnnnnnnnnnnnnnnnnnnnnnnnnnnnnnnnnnnnnnnnnnnnnnnnnnnnnnnnnnnnnnnnnnnnnnnnnnnnnnnnnnnnnnnnnnnnnnnnnnnnnnnnnnnnnnnnnnnnnnnnnnnnnnnnnnnnnnnnnnnnnnnnnnnnnnnnnnnnnnnnnnnnnnnnnnnnnnnnnnnnnnnnnnnnnnnnnnnnnnnnnnnnnnnnnnnnnnnnnnnnnnnnnnnnnnnnnnnnnnnnnnnnnnnnnnnnnnnnnnnnnnnnnnnnnnnnnnnnnnnnnnnnnnnnnnnnnnnnnnnnnnnnnnnnnnnnnnnnnnnnnnnnnnnnnnnnnnnnnnnnnnnnnnnnnnnnnnnnnnnnnnnnnnnnnnnnnnnnnnnnnnnnnnnnnnnnnnnnnnnnnnnnnnnnnnnnnnnnnnnnnnnnnnnnnnnnnnnnnnnnnnnnnnnnnnnnnnnnnnnnnnnnnnnnnnnnnnnnnnnnnnnnnnnnnnnnnnnnnnnnnnnnnnnnnnnnnnnnnnnnnnnnnnnnnnnnnnnnnnnnnnnnnnnnnnnnnnnnnnnnnnnnnnnnnnnnnnnnnnnnnnnnnnnnnnnnnnnnnnnnnnnnnnnnnnnnnnnnnnnnnnnnnnnnnnnnnnnnnnnnnnnnnnnnnnnnnnnnnnnnnnnnnnnnnnnnnnnnnnnnnnnnnnnnnnnnnnnnnnnnnnnnnnnnnnnnnnnnnnnnnnnnnnnnnnnnnnnnnnnnnnnnnnnnnnnnnnnnnnnnnnnnnnnnnnnnnnnnnnnnnnnnnnnnnnnnnnnnnnnnnnnnnnnnnnnnnnnnnnnnnnnnnnnnnnnnnnnnnnnnnnnnnnnnnnnnnnnnnnnnnnnnnnnnnnnnnnnnnnnnnnnnnnnnnnnnnnnnnnnnnnnnnnnnnnnnnnnnnnnnnnnnnnnnnnnnnnnnnnnnnnnnnnnnnnnnnnnnnnnnnnnnnnnnnnnnnnnnnnnnnnnnnnnnnnnnnnnnnnnnnnnnnnnnnnnnnnnnnnnnnnnnnnnnnnnnnnnnnnnnnnnnnnnnnnnnnnnnnnnnnnnnnnnnnnnnnnnnnnnnnnnnnnnnnnnnnnnnnnnnnnnnnnnnnnnnnnnnnnnnnnnnnnnnnnnnnnnnnnnnnnnnnnnnnnnnnnnnnnnnnnnnnnnnnnnnnnnnnnnnnnnnnnnnnnnnnnnnnnnnnnnnnnnnnnnnnnnnnnnnnnnnnnnnnnnnnnnnnnnnnnnnnnnnnnnnnnnnnnnnnnnnnnnnnnnnnnnnnnnnnnnnnnnnnnnnnnnnnnnnnnnnnnnnnnnnnnnnnnnnnnnnnnnnnnnnnnnnnnnnnnnnnnnnnnnnnnnnnnnnnnnnnnnnnnnnnnnnnnnnnnnnnnnnnnnnnnnnnnnnnnnnnnnnnnnnnnnnnnnnnnnnnnnnnnnnnnnnnnnnnnnnnnnnnnnnnnnnnnnnnnnnnnnnnnnnnnnnnnnnnnnnnnnnnnnnnnnnnnnnnnnnnnnnnnnnnnnnnnnnnnnnnnnnnnnnnnnnnnnnnnnnnnnnnnnnnnnnnnnnnnnnnnnnnnnnnnnnnnnnnnnnnnnnnnnnnnnnnnnnnnnnnnnnnnnnnnnnnnnnnnnnnnnnnnnnnnnnnnnnnnnnnnnnnnnnnnnnnnnnnnnnnnnnnnnnnnnnnnnnnnnnnnnnnnnnnnnnnnnnnnnnnnnnnnnnnnnnnnnnnnnnnnnnnnnnnnnnnnnnnnnnnnnnnnnnnnnnnnnnnnnnnnnnnnnnnnnnnnnnnnnnnnnnnnnnnnnnnnnnnnnnnnnnnnnnnnnnnnnnnnnnnnnnnnnnnnnnnnnnnnnnnnnnnnnnnnnnnnnnnnnnnnnnnnnnnnnnnnnnnnnnnnnnnnnnnnnnnnnnnnnnnnnnnnnnnnnnnnnnnnnnnnnnnnnnnnnnnnnnnnnnnnnnnnnnnnnnnnnnnnnnnnnnnnnnnnnnnnnnnnnnnnnnnnnnnnnnnnnnnnnnnnnnnnnnnnnnnnnnnnnnnnnnnnnnnnnnnnnnnnnnnnnnnnnnnnnnnnnnnnnnnnnnnnnnnnnnnnnnnnnnnnnnnnnnnnnnnnnnnnnnnnnnnnnnnnnnnnnnnnnnnnnnnnnnnnnnnnnnnnnnnnnnnnnnnnnnnnnnnnnnnnnnnnnnnnnnnnnnnnnnnnnnnnnnnnnnnnnnnnnnnnnnnnnnnnnnnnnnnnnnnnnnnnnnnnnnnnnnnnnnnnnnnnnnnnnnnnnnnnnnnnnnnnnnnnnnnnnnnnnnnnnnnnnnnnnnnnnnnnnnnnnnnnnnnnnnnnnnnnnnnnnnnnnnnnnnnnnnnnnnnnnnnnnnnnnnnnnnnnnnnnnnnnnnnnnnnnnnnnnnnnnnnnnnnnnnnnnnnnnnnnnnnnnnnnnnnnnnnnnnnnnnnnnnnnnnnnnnnnnnnnnnnnnnnnnnnnnnnnnnnnnnnnnnnnnnnnnnnnnnnnnnnnnnnnnnnnnnnnnnnnnnnnnnnnnnnnnnnnnnnnnnnnnnnnnnnnnnnnnnnnnnnnnnnnnnnnnnnnnnnnnnnnnnnnnnnnnnnnnnnnnnnnnnnnnnnnnnnnnnnnnnnnnnnnnnnnnnnnnnnnnnnnnnnnnnnnnnnnnnnnnnnnnnnnnnnnnnnnnnnnnnnnnnnnnnnnnnnnnnnnnnnnnnnnnnnnnnnnnnnnnnnnnnnnnnnnnnnnnnnnnnnnnnnnnnnnnnnnnnnnnnnnnnnnnnnnnnnnnnnnnnnnnnnnnnnnnnnnnnnnnnnnnnnnnnnnnnnnnnnnnnnnnnnnnnnnnnnnnnnnnnnnnnnnnnnnnnnnnnnnnnnnnnnnnnnnnnnnnnnnnnnnnnnnnnnnnnnnnnnnnnnnnnnnnnnnnnnnnnnnnnnnnnnnnnnnnnnnnnnnnnnnnnnnnnnnnnnnnnnnnnnnnnnnnnnnnnnnnnnnnnnnnnnnnnnnnnnnnnnnnnnnnnnnnnnnnnnnnnnnnnnnnnnnnnnnnnnnnnnnnnnnnnnnnnnnnnnnnnnnnnnnnnnnnnnnnnnnnnnnnnnnnnnnnnnnnnnnnnnnnnnnnnnnnnnnnnnnnnnnnnnnnnnnnnnnnnnnnnnnnnnnnnnnnnnnnnnnnnnnnnnnnnnnnnnnnnnnnnnnnnnnnnnnnnnnnnnnnnnnnnnnnnnnnnnnnnnnnnnnnnnnnnnnnnnnnnnnnnnnnnnnnnnnnnnnnnnnnnnnnnnnnnnnnnnnnnnnnnnnnnnnnnnnnnnnnnnnnnnnnnnnnnnnnnnnnnnnnnnnnnnnnnnnnnnnnnnnnnnnnnnnnnnnnnnnnnnnnnnnnnnnnnnnnnnnnnnnnnnnnnnnnnnnnnnnnnnnnnnnnnnnnnnnnnnnnnnnnnnnnnnnnnnnnnnnnnnnnnnnnnnnnnnnnnnnnnnnnnnnnnnnnnnnnnnnnnnnnnnnnnccaactaatgtgcccctttttgcctctgcctccaggactgtccaacccattccagggtctcatgaagctgggcaccgtggagcggcagggggcaatgggcatctggaaggagctcttctgcgagctctccccactggagttccgcctctacctgagcaacgaggagcacacctgtgtggagaactgctccctgcttcgctgtgagtctgtggggccagcccacagtgacgggcgctttgagctggtcttctctggcaagaagctggccctgcgcgcctcctcccaggacgaagctgaggactggctggacckggtgcgggaggccctgcagaaggtccggcctcagcaggaggatgagtgggtgaacgtgcagtacycagaccagcctgaggaaccccccgaggcgccccagggctgcctctctccctcagacctgctctcggagcccgcggccctccagggcacacagtytgactggtcgtccgcccaggttccagagcyagatgccatcaaggagtccctgctgtacttgtacatggacaggacctggatgccctatatattttctctgyccttggaggctctgaaatgtttccgcatcaggaacaatgagaagatgctgagtgacagccacggcgtggagaccatccgggacatcctgccagacaccagccttgggggcccatccttcttcaaaatcatcacggccaaggctgtcctgaagctgcaggccggaaacgccgaggaagccgccctgtggagggatctggtccgcaaagtcctggcatcctacttggagacagccgaggaggcggtgaccctgggcgggagcctggatgaaaactgtcaggaggtgctgaaatttgccacccgggagaatggcttcctgctgcagtacctggtggccatccccatggagaaaggccttgactcccaaggctgcttctgcgcaggtgccgacttgctctgctgccacccccagcctgccagcctcactccgcctcctgctggttcctgatttaggctccccacccttctgcctccccgcaaatgcccccatccttcccctagggatgaggccacagatcaggcttgccctacagcttctgctcctccccagccccggctggggccagtgccctgctcataggcagtgggccctgctcacccgtccctctcctggcacctcccactgatgggccacaggctggctagtcactgcgctgctcagggagtcccagcctgcttcattttcttcttgctctacygtcctgttctttcagagcaggggcatggtttccttccaaatatttctgctgcttttctaagtgtacaccctttttttttaattacaaaaatgggctcgtgctattcagtgctgtccaatagaactttctgtgatgatgaaaatgtcctagatctgtgtgtccagtgccatagctgcgagccatgtagtgctaccaggtgcttaaagtgtggctagtgtggttaagcaactgaattttccatttaaattcatacatttaaaggggacacacggggctcttggctgctgtgttgaatgctggatatattgttccacaacttggttttttcctacactgtggatgttattccaaatcagtacatctgctatgtcttcctcatcatcaaatctaatacttctgtgctgggcactgggccagctgctttatttggattatctcatttaagtctcataacaaccctgtagagataggcgctactattatcatctctgttgataggggaggaaaytgaagcacagagctggtaagtacctggttggtgtctgctactgagctcacacagctagtaagtggcagaggcagaattttccttttttgtttgtttgtttgtttgttttagtagagatggggtctccccctgttgctcaagctagtcttgaactcctaggctcaagtgatcctcctgcttcagcctcccaaagtgctgggattacagatatcagcaaccatgcctggccagaggcagaaatgggaccctgacagtcaggccccagagcctttgctcataggcaggaccctagagggcatccctctagggtcttattcaaggttgagtgacatccccctgcccatgttccattgttagcycctcccactccccccaccatccagrggcagatggcatcccatcaccatgggacccttaggtgacctgtgagggggttgtcctgctgcagaaggccagagcaagaagctgagccttggtttgggagctgtcctgttggcacagactggagggaagcctgtttcaagcgtctgaaaggaagcagtctgcggttggccccgsgaggatgggagaagctaggcagaacagagcttcctgcagaaaacacctgcaagcctcgcttgacctctcccccgcctgccccagcactcacactttgctcttcagcctgtgraggccaggctctgagggggccaggactccagggcttgcaagaaagggttcctcgcctgtgggtgtgaatgctgcgggggcaactctcaccatggctgccacccaccagcgggtgggactgtgccaccggggagtttgggtttcctttctacccagcaggcatggctcagtggcagacaccaaccactggcatctgggttgtatttcataatttgcagggtacttgcagaaccttgtctcatttaagctttgtaataaccccacaaaatagctggtagtagctgaattttacagtcactgaaatggaaccttgaagaaatcaggtgaaggtcagggtgaggcagcgggtgaggagcagagcccgccctctggtcccaaggcccggggacccttctgcctgcccctggaggagttacggcacatgttcagggtttgagtcagggcctctgctttttgcccagggcacatcccactcccattcccactggccccggctgtggagacacctccaaccaagggggctgaagccagccctgccccacagtcccgaggcatcagatactgtgcacgctcccctgccccctgctggctacccatccactccctgttgccagccccgaccccggtccctgtcccccagctacttcactgcttgccacagcccctactctgctgcttccattatggggcccgagtggaggggtggacctagaggaggctggcattgccaagccagcagtggggacaccggacacaggcagcaaggggtagtggagcagaactcaggctctggaaccagccaaacccagatctgaatgccagccatgccacttcatcactatgtgaccagacagatttcctaacctctctgagcatccatttcttcagctgtaaaataatgatagttcttacagtgtgttgttgtaaagattaattagtaggggagttctgagtggtggaaatacgagtggtggttattcttgtgtttgtgcctaccttaaaaaaaaatcaaccagcagatcctttccaccacagcagctcccaagttactaggagctgactctggccacaccactcactctccacccatctccccaggctgctcccggcagatcggcttctcctttgtacgacccaagctctgtgccttctctggcctctattactgtgacatctgccaccaagacgatgcctcagtgattccggccaggatcatccacaactgggacctcaccaagcgcccggtaagtctcgagcccagcagcccagctgctgagggacagaggggtgttcactcctctttgctgctgctgttcatctgtttagaggagtttggctcctctaaacaagggaagctggggtcactggttcaggcagtgtgacgtgggggagctaaccaagagaaaagcttggtgcctgtccacagccctgggcagggctctatcggtggctgtcttggtccccaggaggaaagagtttgaggatggtttcctgcagctacaaacataactgcttaaggcaccagcagataaatgatagatagaaagatagataaaatagatttgatagattagatagatagatggatggtggatggtcaggtaggtaggtggatgagcaggtggctaggtggatggttaggtggctgggcaggtaggtaggtggatgagcaggtggctaggtggatggttaggtggatgggtaggtaggtaggtgaatgagcaggtggtggctaggtggatggataggtaggtaggtgaatgagcaggtggctaggtggatggttaggtggatgagcagatggttaggtggatgggtaggtaggtaggtgaatgagcaggtggctaggtggatgggcaggtaggtaggtggctgagcaggtggctaggtggatggttaggtggatgggtaggtaggtaggtgaatgagcaggtggctaggtggatgggcaggtaggtaggtggatgggtaggtaggtaggtgaatgagcaggtggctaggtggatgggcaggtaggtaggtggatgagcaggtggctaggtggatggttaggtggatgggtaggtaggtaggtgaatgagcaggtggctaggtggatgggttggtggatggatggatgggtaggtggttgggtagattggtgaatgggtggataggtaggtagatgggtgcctaaataggcatatgggtaaatggttaggtggatgagtggatggcttggtgggtaggtggatgggtaggtagatgggtagatgggtgggtgaatgggcagatggctagatgggtagatggttaggtgaatgggtagatgggtagggagatgggtaggtagatgggtagatgggtggatggtgggtagatggctgggtggatgggtgaataggtaggtggatgggtagatgggctggccagcgagctggctataccttggagcagtcatccttgcctttgccaaccctatgaggcccaggtgactgcactcccctgtaggccctacatgggcttatttatttcatgtttttgaaaagcactttttctgtgacttcccccattattaagataatacacggttattgtttaacattttaaagttacagaaaaacccaaagaccaatcaaaattctgtgtcataaacaagagatcaccattattaacatttcggggtatacccttttctgtgcatttattgacatatgcatctattttttataaagttgggatcacacaggactcatactgctttataagaagcttggttcacttaatattatgccttgggtacttttttatgttcaccaaatgcttttgaataagatgtatcttaaagtctttcagaattttccttttctccagctgaacttagccactttcctacctgtgttaccatgagcaaattagcttcagtttcctcatctgtaaaaggagggttaacaacagtgtctgtgtcggggttgttgggagggcaggtgtggcagtgtgtgcctgtcagtaagaacagtgtcctttccctccctggggcctgtcacacctcctgcctatgttcacccacccatccacccatctacctaattcacttggttagtgtctgcctcaaggggtacaaatttggttttcttccaagggcacagatttctactaagacagacacagaaacataaggaagaagctgtttgctcctctggagagtcagggcctgccagctatgtagtcctgatgtgtggatgtgtcttcatcatagtgcagggtgattctctcagtcagttctacctcaacctccacctccctggggcggggaaccccgcagaagttggcttcattttgatttttttgttgtttgccttgtccccgcccttgctctcagtgttaaatatttaactaactacatagaggaaattaagcctcaaaatcaccaaaaatgcaaagaaccctttgatcataaaacacgttaactatttacaggaccctgatacttccgctgagccatctccttattcactgccctcatccttgtgccacttccttttctaactaggaaagtacaatcctagctgggcacagcggctcacacctgtaatcccagcactttgggaggctgaggtgggcggatcacctgaggtcgggagttgagaccagcctgaccaacgtggagaaaccctgtctctactaaaaaatacaaaaattagctgggcgtggtggcgcatgtttgtaatccagctaatccagaggctgaggtaggaggatcgcttgaacctgggaggcggatgttgcggtgagctgagattgcgccattgcactccagcttgggcaacaagagcgaaaccccacctcaaaaaaaaaaaaaaagaaagaaagaaaagtacaatccttttctaggcatatctgagatcaggaaatcctcagctcgctctccctctcaaagattgctggcctaggaaagacagggaaattcaagatagaaagtggggggcccacgggtttggggccttattgttcgccgttgctgttctggctgacccactggtgctgaggcctggctggcactggcaggatgtcagcccaggagtggggcttctttctgtctcctccattcccacaggataggaacagtcgctggggagcacaaagcccctgcccatctgcagtggttggcagtgttcagcgcacattcctgtgtgttatttcactggagcctcacccaaggcctggggccaagtcatgggaagagctgagttaggaytggagaacagcagcttgacccaagtcaccaggagtttgccattgggctgtccctgggctggggggctggtacctcagggccccaggctttgggaaaagaagaggttgtccattgckgggggaggtgagagatgctggtggagctgggagacaagaggtcagaggccccctcagcccccaaatacaggggcaggtctcctgagggccagtttagtcccccaaccctcaaggggacaacagggccayaccaggcactcacacagcagctgatagcagctcacatttactggggatgtgccacctgccaggccctatgccaggagctctcctggaatacctcttttaatctgaattcaaaataatcccatgaaaaagaagctccagtcctgggctgacatcctgccgagtgccgggccaaagcactaaagcagcagcagcgaacgaaaaggccccaaacccgtgagccttaattgctctcattttccccattttacagatgaggaaactgagtcacagagagggataagtttcaccaattcatacaggtataaagtggtggaggcaggattcaattccattctgactcygaagccagactttttttcccctacacaatttatcagaatttgaaaaggttgctggatacgacagtcaaataaatcaatttcatttctatatatcagcaaacaaattactattttaaaagataatcacttataatagtatcaaaaacaaagccaccagaaataaaatatgtaacgagaggactagttaagatgttaaagatctgagccaggccaaagccagacttctagtcactgtgcacttgtcggctgtggagacaacagctcctccgtccttatgatacagcgagatcactgcaggggagggggcttctgattagtgcagcagcctggtgttcagagatgacacctcagctcaaacctggcaggttctgcaggcaggttgtataagctacgttagcccctctaagcctccgtttcctcatctagaaaacagggacagggacaccctccctaacaggttgttctgagaatgacgggaggatgtggtcaagttcctgacccagtgttttgcaaatagtaggcgcttgattattggcattggtattaggatcagggccaagggtagaaccttcaacaccctgtcagccaggagagactgagatggatcactcagctgcacacagagtcccggtgttgctactggtgtgagccgagggagctcagggaagcctgttggtgagctgtgtctgatctgtagcttcctgtggctggagcctgactcagcccgtcacctggttcctgagtcagggcacagaagggagtgcctgtttccttcagtggggggaaataggggctgggaggacaggaaagagtgggaaggatctgtgaggcccagagggagggggcgttatcagagcagtccctccctcatctcagcatgattggggagggggcagtgacccttgtcattagagggagagcgggtttgggagtcagataaactgggttcagagcttgactgtaccatttacaagctgggtgaccctagccaaatctcttcatctccttgagcctcagtttccccatctgtaaaatgaagatagcccctcaggtaagtgagcaggtcatgtggcacctggccaggcagtgctcactgaacagccattccttcccatccccaatgtctggtggtacccccagatctgcaggcaggccctgaagtttctgacgcagatccgggcccagcccctcatcaacctgcagatggtgaacgcgtctctgtacgagcatgtggagcggatgcacctcattgggaggagmcgggagcagctgaagctcctgggggattacctgggcctgtgccggagtggcgccctgaaggagctcagcaagaggtgagcaacctctacgtgtatgcgtgtgagtgcacgtacacatgcacatgcatgcacacaaacacatacttatatgcacatgtacacacagacacacatacacatgtgcacacatacccacacacataaatttatacacaaacgcatagacatccacacccatgcacatgtgcacaaatgtacacacatgcaggcactcatgcacacgcacacacacacaagggcagtgcccagggcaaggcgtccacctrgaggaaacctgggcagagatcttcccattgggcctgggaaatgatcacatcttttgggggtgattttggggttttgttcatgtatctatttgttcactcaaaaacatggactgagaacatactaagcactgcacacctggcgaggcatgtgggctccaacactgagcagggcagagccagggcygacccgctggaagcctctggcctggcagggaagacaagtgggaaagccagtaactccatccgggggtgagggtgagagggagacaggtgggaaagccagcaactccatccggggctgagggtgagagggagacaggtgggaaagccagcaactccatctgggggtgagggtgagaggcaggacgtcctggaaccacagaggcttgacatccagcccagatcagaggaggacaaagcaggaaggacttcctggaggaagtgacttataaggtgagacttgaaaaattaggaagaatcagaaaggagaagcaaagggggaaagagcattctagacagaaggaatggcacgcacaggccatgaacgaaggcaccgttggtggaaagcccagggagaactttggctacagtgacgagggaagtggggagtgtggcgagaggcaggcgagggccagatgttcccgtctcttccctgtaccagccagtcgtctggcccatgccagcctccctcctgaaattgtccaaagaagacgtgatccgggcggggccctcaggatgcccttcaggaagcttctcttacccagggcctggggcctttggtgctcaggaatgggatgtgatgctgggcttcaacagggacttaggcctctccatgtctgtcataaacacttcctagtcctcaggtcacgcccaggctgcagtcttcccagggctgtgctctcccagcaccctcaggagggcagacctcaggcggagaagcctgccggtgcctactgcccagaatgggcttcaaatccacctctgctgggtttctgggggcagggaccggttcacaagcccctccaggttcccccgtctggccttccctccccacagggctggcccagagagcgcctctctgaagactgcctcctccatcctggctgcagtgctcccagagccgggcctcctcagggccagggtgtgccccaggcaggtccccaggggctctcaaggggtactgcagggggctctcccctaggcagagaggagaatttggccccacagctagctgccagctgagccttggtctcctctgtagggcctggaagaacagaaagccttccagggaccaccatgtgggaccctagaccctagaagacttcaccccaggaggctctgcccatcccaagcatccgtgggtgactgggtctccacctcttggcaagcgctgactyactccctacctctgagagtccatgacccagggctccagagagactatcctcctgcccacctaaccaggtggygaaatctctggggtcaggtggggccttatcaccctccttggtcaaggagccaggtacctgcacaggcatgcagacctgtgtagaccagatgcctgtggggtgggttgtggaccccagccccattcacccatcccyrccctgctgagagagtttgttcatcggctttacagacctgtctctgtgggcaccaggggcagccctgtctctctctccctgaccctcctgctccatccctgggcagcagcgctgtactcctgctatgtgctcagcctgcttcccatgcctgtggaagtcccatggaaacagcatggggcaggggaaagagygtgggaggccctcacccactgtgagtcaggaaagttgcttcacttctccgggtccagctttcccgtctataaaatgggccagtgattcctctgttcctgtggcctcctgagcagtggtgagrgctgcatgagggacccagagtctgggccacagatggccctgggtcagcatcgtgtgtgccctgagggcacctgatccagccttggcaggggccagaggagctcccagaggagatggcatctgagctgagggcatgcagagatattttcctttttccttctaaaatgtttttcttctttacaaaggtcaatcttccaagcgaggaaaatttatgaaagggaataaagcagaccattcaatcagcccttctcagagcccaccaccacctgcttctgcacctcactccatccacacacacatgttgccacaccagtggcattgtgtgtctgttgaactggggcttagaaaaatgagaaaagagtagaaagggcaggggagaacctggctttcctggctaagagaccggtagcaagaggctggcaggagcacagctcactgacacccttgaggggctctgggcagctgggcttcaggtgcagggcccagaactcaaagggccctcgaggcctttggatttgatctgccacctgtggggaaccattgaagggttttgagcacagggctgtcacttccggtcagcggcttagaaaagaccactctgaaaagaccaggtgcggtggctcatgcctgtaatcccagcactttgggaggccaaggcaggtggatcacctacggtcaggattttgagaccagcctggccaacatagcaaaaccctgtctctactaaaagtacaaaattagccgggcgtggtggcaggcacctgtaatcccagctactagagaggctgaggcaggagaatcacttgaacccaggaggcagaggttgcagtgagccaagatcatgccactgcactccaggttgggagacagagcgagactctgtctcaaaaacacaaaacaaacacacaaaaagaccattctggccccagcggagtgcagttggtgaaggggagagccctgggtggcagctggtgttagtaattagcccagggagctgggcctggaccgagtcagccagagggaaggctgtccctcccgacagccggggaggggtgggcagaggaggagccagggctcaggagacaggtggcacccaggccccccacccatgtcccccggatcttccagcccttgcctgaccctttccttccccatcacttcatcggttccaggagctaagagtcgacctttcccctcatcttcctctctcccggagagccgtccagattcctctggtctgtttcccaggtagccagcctcacgccagaggacaaagaggttctccttattgtgtgggcggagaaactgaggccctaagtagggctgactgtgccctggtgcatgagagtttctctcctggaagccaggaggggaagtggcttctcacccctgggtcggcgccctctcccctctggccttgactgagcactgtggagaagccagtcacaagcccttgctgagagggtgacaggcccagggcacaggggctcccagggcttccacgactgtggtcagaggacagatggcaaagctaattctccatccagatcagcccaccctcctgccagctgagggccaacctgtgtccccccagcccgctgtgtcccatgttttcttggtgacaaatggcagcttcccttcctagagtgtaggaagtttactggggtcaccagcatggtaaactgaggggccagttggcatcttggcctgtgtggctgcttggtgagactcaccctctccaccccagattgggctcccctggaccacagctgaggccactagctgggacaaggccaagtccccattccagatgctccacagcttgcacctgggaggcccagacccagggctggcaccatcctgtccccagatgtctggggcatcctggggcaggttcccaagcatcctctgacttggagtaacctcccacccccagtacccatgtaaacacacacagccaggccaggcaggttttgtaccaggggactttctgcaagtgtttcctctccatctctctggatggggcccgctggatccctgccgttggtgtggtggaaactagagccgcgttggcagctgagcccttgtcctctgctccccccgccacctctgaaatgggactgctgtacttaggacacgtctcggttgctctcatgtagcactgaaaccagacacttggatgtctgtccctcggccaaaccaggggccacaggagggcagaggccatatcctgtgcattactgtccccagcactgtccctggtatgtgactktggcaataatgacaacagcctgcatctctaggcatttaccaggtggacaagggtgcaggctcaggagccaggcccctgtgttcaaactccagctctcccacctactagatatgtgacctcaggcaagtgacttaacctctctgtttcctcttctcaaagttggggttgtgttagtaccagcctcacaggattattgtgaggatcaaatgaatgagtgcgtatgaagctcttagcccagttcctggtcccagatgtcagcacctatcctcctcatgattaattaattaattacatgtttactgtgagctctgcaccaagccaaatgctttcaataagttactcaatccagacaactccatttcccagagaggggaacccaaggttcagagagcttaagtaacatgtccaaggtccaaccagctagttagttaccttgaagaccgggtcccaagcaggctgaattgtgctcctaggccctgccccgcccaggcgggaggtgtctgcctggtgagcagcgccaggggaatgaaaataaacaacacgggctggcctgggtcttcgaaacttttctaaagaatcgcttgtgttttgtttgaaggctcaaccaccggaattatctcttggagtctccgcataggttccgtgttgctgacctccggcaggtgagagtgtcatgcctaccccgcccagaactctagaaagacttcattcctggagaagtcagcaaggaagatgggagagagggtgtctgtagtttactgaagaagacagcagtctgcagcttttctgcagctcagggtgggttgccctgctgccccagcttcctgggcagggacggatacccccagcacccmtgaaataaaactccagcaaccccaggatcgtagggaagagagtttggaatactcctttccccaaggggagggtacagtggatttgggtctcatctataaatcccataagccccgagtgacctcagtacccacgggctggatgctgccactactcagcctgattcagggaggttttcttttcttgcccgcatggaaactgggggtagaagttctctaggcagggtgccatggcgactcagtgcagctgcttgaaaggcctggggcctcagtttaccagccctccgcagatcgcagacggggtgtatgaaggattcctacttaccctccgcagatcgcagatgaggtatatgaaggattcctcaaggccctgattgaatttgcctcccagcatgtctaccactgcgacctgtgcacccagcgcrgcttcatctgccagatctgccagcaccacgacatcatcttcccctctgagtttgacaccacagtcaggtatgcgggacacccagccagctgcctcccagccctacccttcgccacacccacagcctggcccaagcacgcagggcagcaggcttcgctctatgggcaggaatgtattgaacatctgctttgtgccgtgccaaggggcggtgcagttgttcagggcagcccacgccctgggcagtcatggccagctctggaccagttcagggggcaagacaagctctcccaggactcctctgcctctacagaaccatctgtcttcctaaagaagaggtggctgccggctctctgagtggagcctcctggggtctcagtgtatgcatgggttgaggagggttgtatgagttaccgccctgcactgttggcataagaccaggcacaaagtgggcacctggtgggtggtagctgccactgccactgctactgcctcggttgctgaaatgatccctcttgttcccagttattgctcattatcagcaacctctcaatggaaaaattcatccagaccttcctgcaacccatgtgggagtggaaaactgaactgggaacattagttctttttttatcggtgtccactggccgggattcagccctgaatgggcctgggagtgagtttttaaaattatacagtcttggccgggtgcggtggctcacgcctgtaatcccagcactttgggaggccgaggcgagtgaatcacttcaggtcaggagtttgagaccagcctggccaacatggtgaaaccccgtctccactaaaaacacaaaagtaagccaggtgtggtggtgggcacctgttatcccagctacttgggaggctgaggcaggagaattgcttgaatctgggaggcagaggttgcagtgagcctcacaccagtctgggcaacagagcaaggctctgtctcaaaaataaataaataaataagtaaatgctttttaaaatacaggtaagaaatctttaatgaatctcaagcagcatttataaaaaatgcagtaggacagagaatatcagtgtgcattgtgtgacgtatgggtaagcactgtttcgagaatctcctgttccgggatggaaaggcacagcgtgcgtgcatgggttacacagtatgtcacagccatatcgtgggttctggtcaaaagtgctggccagcgtggccacaggtcaacctccagcccagccggcaccagcaggtgtgctgctctctccccaggtgtgccaagtgcaagaccgtcttccaccagagctgccaggctgtggtgaagaagggctgcccccgctgtgcycgcygrcgcaagtaccagsaacagaacrttttcgcctgatgcccmtctgctgaycccrctctgaargccgggggtgagtgtggctcagccatcccrgctgggtttcctatcagcccaggatactcaccgtgtcacagctgtgtccccttgtcaggaagacctcagatgtgaccagagcacyggcctccyavagaaagcccaggaagtccccrtgrtgtcccctggccctccccccacccctctgctgcaggaggcgtggccaccaccagatgctccctgtctggggcaggcagggccgtttactcaccaggccctggctcaccagcgtcccggcgcctccgttagggctggccaaacactgtggaaaggggacttggggarcattttcaattccacattcctgattaaaaggtctrgttttttaaggtgggtttttcccattcatatttcaacagaaagtattttttattcttgaccgtatgcgagtcacccatgaaatccagacattttcacccccagcggatgcacaggagcctctcaggcctgtcctagaggcagcgggtggctgttgggcaggccactgctgggacagggcctgtgggcccacccagtgcctttcctggccctcactgccagtgccaaaccgcccctcagcagggcagggccagtcctggtgaccccacttcctctctgtctcctctttactccccaccccagtgcgtctcacctgctgagcccacccctttctcagcgtcagagcccctagctcttctctagcctggggccttggccccattaggagaaggagaaatgactggaaaccagcactttcagcactatgagccctcctcggtttagggagggtcgccgtcttgcccacccccaatccccgtgccctcctcacccctctacagacaggggcactgctgcagatgctccaggcccaccttggtgggtgcccggggtcaccctctctgcctgactgacccctgccagggcacagataggcaggaccctagagacagcaggcagctgggccctgcactgtggagaaatgacctggtccttcgccctaagctgtgcagggcatgcgggggagctgccctgtggatgcagccgccgcctcacaaagctatgaattcccaaagcatcactgaacttgcccagccaggacactggagactgaagaacttccccggagcaggactgcctttgaaggggccttggtgctggggtgggagcctggaattgtttttgaagtgaagttcagaccctccaggcttcagggaaatgtgggtttgctggtctctctgtcgccttctcccacctctcctggacccagcgggccctcagtcctagctgtcttacctgcgctcagcttggagtctgaggcctcaggtggagatccacctgtcactgtcagagatgagcccacccccacccctccctgggggtgatcagctgctgagtcacccacccagctttggagctggatgcctgtgcagaacagaggtggcggtggcaggcaggtggaggctgtgcayagcttctccyggtcatggcgcacacctgtgcccagatgccaatacctcctaagccaggagctgggttatgcacctgccrtgaccacaagcctggcctggtcagagccctcattgccccatccctgagtgggcaggagtctggcctggggagggcttaggcctgtgaggattcttcccgaaggcgcccttggaaacagactaattctcagggaaatcagattgcggtaaaatgggatggaaacagacaacattcagatctgcgatttcctgtccttgaaggcccctttcagattacaagttggcaccctctgcccatctaggtgccacagcttcccccaaggacaatagatggtagggccagagaagagaagagaaactgggggagggaggcccagtggagggccatggcacatgacctggttctgccctgccagtgggctcagcccctctccatcctcagccaagcgcctctgagggcacttgtttccccttctcacccatgtttttttgagacggagtcactctgtcacccaggctggagtgcagtggtgtgatctcgactcactgcaacctccgcctcccaggttcaagcaattctcttgcctcagcctcccgagtagctgggacttccccttctcttctgcctgaaggaggacgggtggtttggagattccagtccaaaccccaagagctcatcacataataaaagtgtcataatagctgatataggcaggcactgtggctcacgcctgtaatcccagcattttgggaggccgaggcagtcagatcatttgaggtcaggagttcaagaccagcctggccaatatagagaaaccccgtctctgcagaaatacaaaaattagctgggcatgatggtgggtgcctgtaatcacacctactcaggaagctgaggcaggagaatcacttcaacccagagacagaggttgcagtgagccgagattgtgccactgcactccagcctgggcgacagagccagactccatctcaaaaaaaaaaaaaaaaaaaaaaatagctgatatatggtgtacgctgggcatgtggtaagcactgcttagtggatctcatttaatcttcccaataatccagtgaagtgggtgttactattgataggaaagaaagctgagctgcagagataaggcagaactcccaaggcctaccagccgccaagcagcagagtggggcatcatacctgcctgaccccacgcaaagaccatcaccactgccagccgctgcctggctgtgctgcaggtggggagagacctaaaaggtagggagggagagaagattcctccagtcactattttctaagcatgtcgggcaccaaagaccaatgctgagttctgctgtgtgcccaccctggagggtcccaaagtgccaccaggcctcagacacactgagattctcagaggaagtgtagactcacgggtgggcaacgcctagcaggggcaaagatacagaggtaagggagttccagaacgagtgtggccagattcagcttcccatccaaccctgggcccccaggaggtggagtcaagaggggccatggcctggggtgtgggcttctcttcgtcccagaacactggcctgaatcagccagctctccgcacacacagccacgtccataggcacaactgtttctgggggcccctgagggcagggggtctgctagggctgtggtttgtgacgtgtggagtgagcgcaggctcagatcagggcgaggcagcttgtccagagaggcagataattcccaaacagaagacccccaaggcggagggccctggggctggactcctggcccccaggaggttgttctgagcttaccctgtggacggattggagggtggacctctttccccgcaagggtcaagagggaatgggggatggtgggaaggcaatctggccaggagaagctgcgcgggagactcccgccatccccagtcccaccatctcagccccgcggcctcttcctccctggagacagccaggatcccgggagtggcccaggatcccgggaaatgcaggggagggggtggcatctttcctcttcaggcgcgggcctggcccagaggcgacaggaagccaggacgccggggattgtctctcgcaaccgcagcccagccccagtccgggaggaagttctgccgggcgctctccgccggtgcctcactggttatagtgctatacaggaaacctggcagcgccggagccgcgcggtcgaggagggagcgcgggacgccgagcccacgcgcgcctgccgggacaagtggagacgaggccggcgagcggacgccccgaggtgcccgggcaggcagtgggccgccgagcgggagttgaggtgggaggtggggtgggggtggggaaaggggcagggttggggagggaagggtgcggcaggtggcgggtccgcacccgggagctccgcgcgcctgctccccttgtctccgtgctggggcgggagctgctcgggccgcatcccacggggaggagaaggtaggcgaagggctgccctccctctggaggcgggtggggagcaggcccaggcccctagcgccgacccaggcgttgacgccgctgtagcttgcgtcgcctgggcagtggacgcaggggacctcctggcgacgggtgcgctctcgcgctccagggatcctctcggcccccaccaatccctccccttctctgtgttcccgcaggttggcgaaggagctgtggccgggtccccttcttatccagcccgagacactgcgctccggtgggcgtccctgcgctgggaatccctctcggagtttttccaggcccggccgggttgctccgggaaaggccctgttgggggaggtgggcccggagctggcaggtctacaatccggttggaagggctcgcagtgggtgattcagggtgccaatgacctccccgcgaacgggaacgcccgcactagacaaccagccccagaccggcattcccagagccgcaggcgggagggacgcagggactccgggacagcaaatccccgggggagaagggaagggggaaggcgggacaggggaggcccaccctccttgggctccgctagcgaccagccagcgccccttcagacgcagccttcctggctccggaccccggctttctgctccggtcctcgtcccaatgccccccaaggtccccagcagaggcattcaggttcctcctcgccccgcccagacgcagcttctttgggtatgggtgacagcactcctgagcgtcgctgtccctattcgctgccgttgccagctccgattccgcgaaacctctccggcaccacctcggaagccccgcccagggcgatggtccgggcctaacctgccggccccgcccacccggcccttgggctccctgaggcccgcccagcagacgtgagtgcgctgcggggtccggggggaaggggcgccggggcagtgtccaccttggggtttgttggctctgggcagctcgatgaccccgcctccggggcccagtgtgcttagtgactcaagtgtataccctttcctagtcgaggaacgcttgacaaagtggcgaaggagccctacgggagtcccggattggaccctgctccttcggtccctcagcctcggcaagccgcggtctcctggcccttggcctgggtcaccttaggaggcaggaggagatgtggtcagtgtgggagcttggaggggccatgcacttccggagaagaccaccgactcatggctttggtggaggggcgccggcagatttagttaagctctcccccatccctgacacacccagccggggcgggagcggggcttgtgaccactccggagagctttgagggcccctgctttgggactccgcacggacagtcactgtctcagagtgcattctccaggggccactctcttggggacactgtaggggtcacagggcaggtgggcagcctctctcggggggcggcgtgagagccggagagcagggggcgggggcgggcccggctcgggctcacgtctgcgttgaagccgctggggaaggggagagaaaccgagagaaccggttcccccgccttgacagcggaggcccccacaccaaggcccttggactaagcggggcagggacagcctccaggtagagctgttcgccggggcgcctgcagagcccgcatcccaaccctgacmccggggccggggcgcaggctcctggagggaggcgtccaggcgggacagggcccggggagcggcaggaaatgggctgctcttcccacttgactgacgggaaaactaaggcacggtcaactatcaagcaagcgtggtgtcgaccttagagcaggtaatcacccctcgttttaaagccaaagtttccctcgcagtcgatttggaccaagactacccacaatctccccaccgcaggactgaagcgaggctgaaatcttagaatcaaccccacggaatgaagaggttgtcctaattccagcactgagtgtaagaatggaagccttgcatgtgattttattcaagtcctcattttagaaatgggaaaactgaggcccgaaggcgaacggcaagtgcagcatcgggactcgaacccaagtctctcctcgagtgctgggctattccgggctcagtggtcttgacttccgcggccctcttccttgttgcctgcaggaaaatgccgcggccgcaatggcggcggatgtggagggggacgtgtacgtactggtggagcaccccttcgagtacaccggcaaggacgggcgccgcgtggccatcccgcccaatgagcgctaccggccgctgcggcgcagcacagagcactgagcattggtggcacgtgcggcgcaagcccggcggccgccccttctacctgcccgcgcagtacgtgcgcgagctgcctgcgctgggcaaccctgccgctgacgcgccgccaggtccccccatcgggacccgcagcccctgagccgctcgcctacgactaccggttcgtgagcgcggctgtggcagcggcccccaacggccccccagcggagccccgaggcggggccagctccctgtgcggccctgcgcagcgcggcgccgcgagccagcgcagcagcctggcgcccggcctgcccgcctgcctgtacctgcggcccacggcgcccgtgcggcccgcgcagtccctggacgacctgacgcgcgccgtcgtctcgcctcccgccggcaacctcggaagcagcggcagcttcaaggcctgcagcgtagcgggctcctgggtgtgcctgctgcccctgtcgcgcagcgactcagagaacgtctaagaggccatccaggaggtacgcggcccgccgcggtaggagatcgtgaagcaggtacgaccccgggcgcggaggcggggaggctcgctgaggacagcgcccgcagggagcctgggctcgaggagacccactccgctcagcgtcgggcatgacgcccacctctgtcggaagacttcggatgagctccctctccccagccgcgaaacagtgcaggcccccatccctcatctgcaatttccaggctccaaagctccctggaagcccgaaagatttttcgtaatcaaattggtggcaaaattgcgcttgaactgatatgaggctgttgatggtctttatttatcgcacttgtgtgaatattcatgttttgctgcagaaatgcaaataagctcgatggccggctgctgccccaagccctgctgggaggttatgtaacctacagcaggtgggtgccacatattatctttccaagtcccagctgttctatattccgaagtgcatctgggcacggaacgggggattgcgggcctgccgccagctcaaggagcctggagtcagatgagagggtggatgtgaaagtcaggcgtctgcttccctttgagggtgcttccagcatttcagttccttttttttttttttttttttttaaaagaactcctgatgggtttgtttcagaaagacgtgttaagtgaggttgttttttcccctcttcagaatccagttgtgttaatctgggaaatcgaaaatagagcacgttttacaaacactcttgcatcctcagaacactctgggggactctgacattttgaactttaggaacttttcagggaggggcagcccgagggggagaaaaggatgcttagaaccgttctgccatctgccaccggccgtgtgatgatctagaggcagctctcttcctctctcagggtctcggtttgttctttagcacaaagggaggggatggacagatgacctctgaaccttgggagcctctgatttatttcgctgtgcctgatgtcattaccatgaacactgatgcccaccatgtgccaggactgagtccgggatgcccagacgaaggagacacgcctccgtaggcccgctgctgggtgttccctccgcctgtctcgttacaatgcagagctcaggttttgagactagggaaaggggaactggattttgctggggcagctgccagctgctgacagccacttaacttacaagcgaggaccaccccctccccccccaggcccagcgtcctctggtgtaagcacaatacctaaggattagggttgtgagccttaaatgaaktaaggcttcgaagcgcttggcagcagcagggggtccacccagactgggtcatcctcgtttggcttccctgggtctgcgccgccttcactctggctcctgcagcggcagcccgccgccttgtggccagggtggaaaacggcacccggcgggcggggctggagaccgcggctggttcctgtttcgcgcccctgccagccagccaggcagcttctctgggatgggtggctggatgccagcgctcttcccccgcagcgcccctccgtttcctgcgcaggctcccggtggcgcacttcccggcctctccacattctctgtcctagtgacggtgggacggtgcctgcccgtctgagcggagcccctggaggtgggggaatggccttgctctttgaacctcgcatctggcccagggtctggctcagacagagtgcacagagagtgtatgttgaatagggcggaggtgcggcagccccttacctatgagccaggcctctgtaggtctgcccaagggccaccaccccaggccccaggaccaaagaggaaggagactgcccaggtcctgacatctcctgagaagacagatcaccccggctgccagggcgcctgccaggtggcccctctgcccatccttcctccagctcccagcaggttcccagttgcagtggcatatggggggaggggcacaggtgatgagggcaggggacttacccaggggggaactaggacattggccagagacaggctgctccctggccccacttgtggccctaattcactatgtgacctccacaagtcactttgcgtctctggttcagtttcctcccctgtgcaatgagtgcaataataccacgttccctgccacggagctttattcaagaggcagctgtggctctccctggtgctccacccccaacaaagtccagggtagggagttggtcctgcccccacaagggaaccccacccctgcccttagttgtcccaggcggcatttccccaccataatcctccaggcccattcactcgttcattaggcatgaactagccaaatagctgcagagccctggtgagcctttggatctagagaggactcaggcacagccacggtcctgggggactcaccctcttggataggaggccagcaacagaagacatggggccggggctcagagtggagcatggggttgagagtgggtgcccaccggggcagggcctcatgagcccttgccaggaatgtgcacgttatcctgcagctgctgtgaggcttttagcagagacaggaatgggattgagaaaaaaatccctgtggccagggcctcaagaatggccgaagctcttggtggtctcgtgggcatgtggtggtaacagaggtttgggagatggatgggcagggtctgggggccgagggaggtgggagggaaatcgggttgagttcagattcccagctggcacttgtgggcagacagtggtgctgcttactgagttggggggtgggggggacttggggaggagcagggtggagaaaggtggggcctgcctggatttaggtgccagacaaagggaagagaagcatgagagtgctggctcagaggacaagaagtgtccagaagaaagatgcacaggaaggtgacgtgagagaaaggccatataacacttatccgaagtggccactagaagctcagctggtcaggggggtgctgaaggcagagggcagtggtcaggagtgaagtgagggtgcgaattgagtgtgtagacaacagacagaaggagagagagagacacagcgtggccagagggggtgtaggtcatagatggaaacatccccaggttcaggtgggtgggcaggagatggggaggctgaagatggggaggagattgttgctgagaagggatctcggaagaaagtgggtgcagaacagagggggcaggatgtggggatggcatggcacgggggcactggggagtgtatagggacccccgtctgtcaggcggcagctcagggcttagggcaggctactgggcaaggccagggacccccagaacagaggagttcctgccatggatggtgtttcacagccttgtcactccccatgcactctaatcgcacatattgagtacttggtgtgggctggtcactgtgctggacactggggacaaagtgtggtaagacgcagtcccaaaggggctaacagtcctgtgggctcttgctcaaaggcttgtaacccagggttaagctcccagcagcttggaaggcaggtgtaggcacctccatttgccctgagtacaaacagaggttcagagaggtttagtgacaggacgaagctcatacagccaggaagtggctgtgtccaggacagttccaggcccctgaccccaagccccaccctggccagcaggttcagtttcagccaggtggcctttagggttggccaccctgttcctctcagcaagaacagtacaagctgaaggcaagcaagcgctccttcttctgagcatcctgcgtgcccagccctgtggtgggagagttgatgtcccaggagagggacgtctcctgttctcttgctgcccaggagagggcagaagcaaccccttctgagaggggagacagggagacagggagaggtaagcagggatgactcctcctctctcccaaagaggccactcagggagccctgggaagccaggccaaaggcggtgcaataaaggggcctctgagactcttccccatggctgtggtcctggctctgggatctcagggtgcagtcaccatccccacccagaagtgggaaggcccaggtgggtggagctggcctggagcccgcccctgctgctggggcattggccgctgggagggaagttccagccggtctgctgcaccttcttatacaagcaaccctggaggcgccgcacctgagcaggcagccccgactggaaggagcgggggccctcatttctcctcctccgctgggaactgtgagtgagcccttgcccctgagggactagagggcggccacagcagtttctccactctctcccctccctttcccaaatcctaaaacccacctgggggcccctcctctctggatccaggcccagcacccacttcctaggacaaactccgagggcagcccgaggccgctgtgattgagagaaagaaactggcctcgggacagacccacctgtccccactcagggccagccagggagcctttggcaaggggcgttggtaatagcaggaagctaagtccaaattgaggggactccagctagccccttgcctgtactccctcctccaacaaccctcacccccaccctccagctggggcagccgcctcagctgtctccctcccagggactcacctgcagccccaggctgtcccaagagcccctctgcctgcctaggacctgacttaggagagagcagcttcttgggtacccctcccaccctcaccccacattgctgtccccccagagatctccctgcacacccccccaactcccctgcaggccacatggtctctgggggtctccctggagcctgcgcctggttctcacctctttagtccctggctcccttcggcccccagaggcctgagatgggccccacctgccccctcacttccttcccaggcctcagtagttgacctcactctagacctattttttaatgtttattttattttaatagttgtggggagcacgtggtgtttgttctttagtggcgatttctgagattttggtgcagccatcacccgagtggtgtgcactgtacccaatgtgtagtctcttgtccctcacccccctcccacccttcccccactcccaagtccccaaagtccattatatcattcttaggcctttgcctcctcatagcttagctcccatggacctattttctctgcccttcttagagatgactatgtccagtacagggaagggtgggcatcagtacttctgaatgccagcctggatgggtggtcagtgccaggccctggggaatgggaaagtccatgatcgtgaccagggggtagctgctgaccagaaatgcggtcggggctccatgcctgaatgttagggagattcagagctggatctgtgccggggagtgagaggtcagcggctgtttgttcatattgagggggaaatagggctgccaggactagggctctggggcacaggggcataggggcacaggtgctcttgctaaattttgggaagctctgtttccagattgcagaaggattctggtgttgagggaacttgcagagctgttgccaggtgagccccgcaggacccttctgtccaactgaggcccctgtgggtgcccaccctgcctccttgccttctcctggctgggggtcccctgtgaggcatgaagggagtggggcaggggcccccgtccaggcctttgtgtctgtctaggggctgggccagagagaggaagcagaggtagcagaagggcctgcctgcagaatcctcccaacctcccccttcctttctcctcgttggcccagttaaatgtgtaaattactattccctccctataaaaatagcttaactccattacaaatatttgaataataggaggaaatctcaatcaaatgactgttagcatgttggtttcttcccatttattctgccttcttatgtgtatgtcttgggcagttcccatagagacatcacagcgtaatgacgattgtgccttctgctttttcacttaccatattcacctagtcagtgaatgtcagctgctgtactgggcactagggagcaatgaaaaataaaggatggttcctgccctcaggtagcttactgtccaggagaaattgaacagcagatccaattatgatatggtatggcatggtagttatggtatggcagatatgatatgatatgacatgatgcatctgcaaagagctgtggggggcatgttggaggagccatcctcccagaatcttgttcgcaagagggaaatccaagagtgcttcctggaggaggaaggtgttggcaaagatgaattcaaaaggtttctacagttccctctcatgaaaccctctggacctggtgcctttttcagtggcagattttttttctcatcagtggtaattagtttatttaagtttctactcaccttctagttaattttggccattttatattttactaggaaagcattcattttctccagatgtgtaaaatctccacttttaaaatttattatgaatttctttgtgaccaagtaaatgatttttctaagtttttcatagacatataagaaaaatgcatattttcttatttttatttttattttattttttttgagatggagtcttactctgttacccaggctggagtgcagtggcacagtcttggctcaccaaaacctccacctcctgggttcaagcgattctcctgcctcagcctcctgagtagctgggattacaggtgtgcgccaccaagcccaggtaatttttgtatttttagtagagaggggattttgccatgttggccaggctgctctggaactcctgacctcaagtgatccacccatctcagccttccaaagtgctgggattaatgcatattaatccctggacggaaaaatgcatattttccatttaagggctataaggtcctaactgcatcaaatcaagtttattgattatattattcaaactttcatttcctttgtatcctttgcttgggggcaggggtcttttactctaattctgatagagatgtgttatgttaaaccttccactcacattttctctataaagctcttctggtgcttttcctagtttttgctttttatatttaactacgatgctgtcgggagcctgcagattttgagtattctgtcatgtcgttacaaattgtgcttttctatcattacgtggtgtccctctttatcctattatagtgcttaaccttaaatttcacccttctattgttaatatgaccactccttattttactttattttttttttttgcacttgcttagcattcttttattttctaccattatcattttttgaaactactaatttcttgtatatgtcacatcactgttttgttttgtttgagacagggtctccctctgttgcccaggctggagtgcaatggtgtgatcatggccctctgcagcctcaacctccctggctgaggcaattctcctgcctcagcaccccgagaacctgggaccacaggcctgtgtgccaccatgcccagctaatttttttttttttggtcttttttgtagagatggggtttcttcatgttgcccatcaccactgtatttttgttgtcttcattttttctcgtttgtttgttttttgagatggagtcttgctctgtcactcaggctggtgtgcagtggttcgatatcggctcactgcaacctccgcctcccaggttcaagtgattctcctgcctcaacctcctgattaactgggattacaggcacatgccaccacgcccaactaatttttgtatttttagtagagacagggtttcaccacattggtcaggctggtctcaaactcctgacctcaagcgatccacctgcctcaccctcccaaagtactgggattacaggtgtgagccactgtgcccagcctatcactgtatttttaaacccaagatgactcgtcttttggtgggagaattcactctgttcatgtttcatttaacaattgatctactgtacttaattacctttggcttattttacatttattggtttatcttgtgtttttcttccctctgatctggttatcgatttcctttttcttcccctgttgcactttccatttcattattggcagctgtcccttctctggggttcctaatcaaacacatattctttagcacatgcctcgatggggattcttttcgcagcaccctcatctggagctcacagaacctgtcactctgtaggttctggtcttttttcagcttaggaacatctatttgttgcttgatttgattattgttagtttgtttatttattgagacagggtcttattctgccacccaggctggagtgctgtggcacaatcacggctcactgcagcctccaccttctgagttcaagtgatcctcccacctcagcctcctgagaagctggaaatacaggcacacgccaccrggcccagctaactttttttgtattttttggagagacaaagtttcgccatgttgcctaggctgatcttaaatttctgggctcaagcgatccgcctgcctcagcctcccaaagttctgggattacaggcatgagccactgcgcccggcctgttgcttgattattgtttcttttaccttttctttcctttgcatgtgagtgctcctgactgggtcccctgcagtttatctttggcatctttatttcaatcttggtgtacttttgctctgaaatttgatatttctttttgaccttccaggctgcaaatttgaatctcaagagtgaatttattccccttcaactaatacaatgacatattttaagttctaaaaatcagtcctttttaaaaattctgcttgattcgagtctccttaagagtttgtattcaagttgtaattgcattctccaggccctctattttgccaatagccttgaatttattttactaggtaatgtatttacaggtttttttaatcaaagcaatattttaaaatctatagtaaaaatctcacatgtaccctgtttccctgctctgttctccatcaactcaaaagtcacccctttcgttcattctttcttcattcttccagagtttctaagtacaaactagtataactacatatctgattacttaattttctctctctcttaagcaaaggtagtaccttgtacacaccatcttgtgtgtaaaacaagattttttttaaaaaaacaagcttgtttacttttatttattcctttgacaatgtatcttggagattatacctagagagtttctatctctttccctacaactacaaataatccattttaccagtctcctgttgacgggcactcggaatgtttcccattttttgctattacaacaatgccataatgaatactcttttatatatgtataggtagatgttggaaaaattccaaaaatgggattttggggtcaaaaggtaaataatagatacttgatgggtatatcccatgaggcatataccaatttgacctcaccaacacaaatgagggtgtcttattccccacagccttgccaactaactgttgtcaaactttccttttctgccaatctgaccataatatgtcttatcttaaggtactttaaatttgcatttttctttccagaaagagtatcttttcatatatttaagggctgtttgtccccctccacttttttttttttttctgtgagtggtctgtttatatcctttgcctgtttgtgtattgggttgttaggtttttttcttattgagttctagtagctttttctatactagagaaaatagccctttgtctattattacctgagttgtaattccctccgccaccctgagcttgtcttttgactctgctaatagcattattttgccacacaagttttcttaaaacacatttatgtagtcaaatgtatcactcgtttattttatggcttttatattttgagtctttgttacaaagtcttatatttatatatatacatatatgtatacacacacagacacaacatattgaagccatatatacacacacatacagcatattatatataatatatatttatatatatacatacagcatattgaagtcttttatatatataaagagacatatatataaaatatatgggcttttatatatatgtacatacagcatattggattttgttttcttttttgattatttttatggcttcatttttaaaaatgtaaatctttaatcctttgaaggttaatgtggatggacagaatgagatgtggaccctcccttatttatatacatgtttatttgtttatctctggatgggctaagttgtcccagttgtcctgtgacctttcactgacaagtctgtctttccccatgacctgtgatggcatctttagtgcgtcctgggtcccggctgtgctggggtctggtagcagcggctggtttagtgtgtcctgggtcctggctgtgctggggtctgttagcagcggctggtttagtgtgtcctgggtcctaactttgctggagtctggtagcgacrgctggtttagtgtgtcctgggtcccaactgtgctggagtctagtagcggcggctggtttagtgcgtcctgggtcccggctgtgctggggtctggtggcagcagctggtttggtggttctctctgttgcccctgctgagctgtcacagagtgagtttgctcctcagagctggagtcaagctgcaggagtaccccacttggaggggtggccctagagtggagaagggatggtggtctctgccagtgagcctgtgggtgttggacatccgtgatgtcaaaacaccagcaggaattctctctgtctccttggtgccctggccttatgggtagagactacctggcccacctgtttggcccccctcagctcctgggcacaaggatacaaaagccacactgccttctccctggggtcccatgatgggccagcctgccccagggttcccctgggagcctccacctcagacatagcctctcacctgtggcagccaggtcccacccacccactgccccagcctctgcttgactcaggcagtagtagcaggtcacagttgggagcagaggggaaacagggcgtgtttaagtggccttattcccagaatcctggctccagagctgtgtctgaaagggagaggaactacttcgtctgtaatacatcgggggcagggattgctggaagagcaagtctgtttccaggtgagaaataatgaacaactttttcttattttcttttttgagacaaggtcttgctctttcacccaggctggagtgcagtggtgcaatcacggctcactgcagcctcaacctcctgggctcaagcaatcctcccacctcgtccttccaagtagccgagagcacaggcttatatggtagtgacagtgaggatggagaatagtaaaaatgtttgaggaattttttttttaattttatttttattatgaaaatgtccaattaggctgggcctggtggctcacccctgtaatcctagcactttgggaggccaaagcgggaggattgtttgaactcaggagtttgagaccagcctgaacaacacagtgaaaccctacctctatattaaaaataagtaaataaatttaaaacttaagaaaatgtccaacatgcagaaaagtaaaaataatttttttatttttgagacagaatcttgctctgtcaccaggctggagggctgtggcacaatctcagctcaccgcagtctctaccttccaggttcaagtgattctcatgtctcagcctcctgagtagctggaattacaggcacatgcctggctaatttttgtatttttagtagagatagggttttaccatgttggccaggctggtcttgaactcctgatctcaagagatccacctacctctgcctcccaaggtgctgggattacaggtgtgagccaccatgcccggccaaaaagaattttttttttttttttgagaccaagtcttgctctgtcacccaggctggagtgcaatggcatgatctcgtcttactgcaacctctgcctcccgggctcaagtgatactcctgcctcagcctcccgagtagctgggattacaggcatatgccaccatgccccgctaatttttgtatttttagtagaggaggggttttgccgtgttggccaggctggtctcgaactcttgacctcaggtgatccgcctgcctcggcctcccaaagtgctgggattacaggcatgagccaccacactgagccaaaaataatatttttgaaaaacgaatacaattacctattgcctagatttaacaatacttgctccttgctggctgctctactaggaaaaaaaaaaagagaaaagagaaaaaacaatatttgccatgtttatttatatttatttatttatttatttattgctgatgaattataaattctaggcatcatatttcaccccgaaaacttcagcatgcatctctgaaaagtgatgtctttctccatgaacaccctccattattatgtctgacaaaattaacaatagttccttaatgtcatctatgacctaagccatcgtcagatttccaccttatcctaaaacatctctctcacagctggtttgtttggttcaggatcccatgcaaggtcatgccttgtatctggctgtctcttcaatctcccttgaagagccccgccctttccttctgcctggacattgactcattgcctgcctgcaaggtgtttgtttgcttccttgcagcagtgttttcatgttcttctaaccctggtgttacgtgagaactggtaggcaggtctgcaaggtttaggctggtgagatcaacagggctcagtgacagatgaggcaaagccagcaggaggcaaggatgattctaccttgggtgacagaagtagatgtcactcagatgctgagaatggggagggaggagggagaggacaaatttgatttggggcacacagytttcaacatgtacaaaggacatccagatggcagtgggctatgtgagcctggagactgtgctgcgagttgttgatctacagccagtggggctgggctctcccaaggcggtggagtgagaagacaggtgagacaccaagcatgaggccgtggcggaggagatggagcctggggcccaactgctgagcagtagcagagaaaaagaaggaaaaccaggaggcctggcccgagaaagcccaagaaggagaggattttaaagagcaaacactggacagaagtcaggccagaggaagattgtcaggcctctaagccggagcaaggtccttgtaacccctgtgacctgcccgtatacatccaaatggcctgcaggagccacaaagtctggagcagccaaaaaaaaaaaaaaaaaaaaacccacaaaaaggagtaaaacagccagctccttgcattgtccctgccccaactcatcaattgaccttgtgacaatctcctcctggacagtgagtctcaggagctccccactgagcaccttgtgacccctcccctgctatcaatagataaccacctttaacttgtacctttccactgcctacccaagtcctgtaaagctgcccctattctatcccccttcgctgtctctctttttggactcagcccatccgcacccggatgtaaataaacagccttgttgctcacacaaagcctgtttggtggtctcttcacacggacatgcttaacaaggaccaggtctgtcatcaaggaagtggtggaaggcctctgagcagtgagctggttgtctaagtgaggggacagagaagttggctcgaaaaggaggaagggaaaaaggatttagttgttaaaaggggatgctggatccagggaacaaactttattttattttattttatttttttttgtgatggagtctctctcttttgcccagaccggagagcaatggtgtgatctccgcacactgcaacctctgcctccagggttcaagtggttctcctgcctcagcctcccaagcagatgggactacaggtacccgccaccacgcccggctaattttatatatataatatatatatatataattttatatatatattttatatatatatataattatatatatatattttatatatatataattatatatatattttatatatatatataattttatatatatatattttatatatatatataatctgtagaaatttgtagacctatttttgaattgtattttctctatttccaaagctgtagtaggtaacaagattaaaaacattaggctttctaagcatagttgcatacccaaatttcagtcgaggcatataaatgctataaatggctgatacactttcttactacatgaccagttttattctacatacaattctaaagaattaaagccttctttacacatatgagtaggctattttgggttttatggtttattaaagaattatcgatgattcactgctcagttctagctatgatcactccgggtgaacctgcagctaaaggacgaggcttacccattgatagcagaacactgtagataggacagcatggcgtcccagctctgatcgtgaatcagatcatgggatcagagctaggactcagtatctctgcccttcagctagccatggtgacaggacgtggccccaactgtgtctcccagattcaagaattatttgcagtgtaaatatgtacgaataaatgatgttcttaacatcacagcgattgcttaaaagtagtggctttcatacttctttttgactctgaccctcagtcaaatacacattttttcatagcagcccagtatacatattcaaaagctttctgaaagactgttttaccttattatgtgggaagcactctgatattttctgtgctagcctattgcattacctttttttttgagacggagtctctgtctgttgccaggctagagtgcagtggtgcgatctcggttcaccacaacctccgcctccctcgttcaagtgattctcctgccttagcctcccgagtagctgggactacaggcacacgccaccatgcccagctaattttttttgtatttttagtagagatgaggtctcactaccttggccagggtggtctcaatctactgacctcatgatctgtctgccttggcctcccaaagtgctgggattacaggcatgagccactgtgcctggctgcgttacattttattttttaaaaagctgaataagacccactatttatttcatagtcactaaagagttgggatcaactgtttgaaaatactattttgaagtatccatgaggtcttacactatagctggaatgataaaaggacccaaaagagcgtttttaggaatatattttgggggggagaatacctgtgatgcccttctttttcccttaggtataaacttgaaaagcttgttataaacttgaaaaaatggtaggtgagtaatttatatgtatggtttcatgtgtatatttgaaatattaatacatgaaagcagtgaataatagtatctgacacgtaataggtacttaatatgtgttagttttctttctgcaggcatatcttggttgtgtaattgtaaacaattagctttagcttttaacttagcttttagacttcaaaagttctatcataagatttatcttaacttactttgagtgattaattttaattattgaaagacagttgattggatacaatttacatctttggctgacataaataatgcagtctttttatttttttggtcaggtactggtagttaactctcaaggagaaatttcacggttgagcaccgaaaagaaagtggtcatgaaaggaagtatcaacaattatcttaaattgggtcaagaagggaagtatcgcrtctaccacaatcaatactccactaattcatttgctttgaataagcaccagcacagagaagaccatgataagagaaggcatcttgcacataagttctgtctractccagcaggagagttcaaatggaacggttctgtccatgggtccaaagttcttaccatatctactctgagactgactatcacccaattagaaaacaacatcccttcatcctttcttcatcccaaccgggcatcacataggtaaaggaaactaaggttaatttattgctgtaaatatactaaatgtttataaaatgattgttgtagttgtgcacttgaaaacgtcattaccaatgagttgaatgaagtcaatgtggtcagcagacaggacgttagaggcatgagtgtacttctaacttactgaactgacaccactaactatttggaggattcctaggagtcagaatctttattcctggaatcagatggagaccaaagttacaactattatgcttttaatttagatcaacctagtgaaataatttctttcatttcttctgaaatacagggcaaactggatcaaggcagttcagatgtgtagcaaactcagagaatttgcattggctttagccattttggagtgtgcagttaaaccagttgtgatgctaccaatatggcgagaatctttaggacataccaggtaagtgaattctgagccttgtaaatgatgaatattggactcgcttttgaaatactagcctattaatcatgaaagttaatgtatttaagaggccatattaaagactttacttttggctcagtttcttcctatataagttgtaaacatgaatgaatattattagttctttctttctttctttttttttttttgagacggagtcttgcactgttgcccgggctggtgtgcagtggcacaatctcggctcactgcaacctctgcctcctgggttcaaatgattctcctgcctcagcctccgaagtagctaggattacaggtgcccaccactacgcccggctaattttttgtccgtcaacccaggctggaatgcagtagtgccatcacagctcactgcagccctgacctccctgggctaaggttattctctcacctctgcctcccgagtagttgggactacagacgcattccactatgcctggctagtttttgtattttttgtagacacggtgtctcattatgttgcccaggctgttctcaaactctaggctcaagcgacctgcctgcctcagcctaccaaagtgttgggattatagttgtgatacatttctgatacgagagcaattagtacaatggttgctataacattttagagaatggtttgacaaaaccaaagttaaaaatgcaatttgactccttctcgatatggtagagaaacttttaccctgtgtacatgagaagacattgtaacagggtattccttataatattatttcataatggtgaaatttggaaacaattcctaagtactcataatcaggcatgtttaaattgtgtcatcatttcataatggactgttacatagcagtgaaaaacacactagagcaacaggtgtggagattgaatctcataagtttacaatagaaggaaaacatttggagagggtgggaggggcataagggttgaaaaattacctgttgggtacagtgtttactctacgggtaatgagtaactagaaactgtccccccagtgcacatagaccccttgaatctaaaataaaataaaaattaaaaaaaaaagaaaacagttccatcactaaaaatacataaggataaatgtatatactacatacatttgtgtagcgtttaaaagcatgtgtgataacacaatgttacagtattgtttagggatacagacatttgtaaaattttaaagaaatgcaagggctatatgcttgaaacataagaaatacacttctaaataaataagaagtgctcaaatgtaaatcataatgaaaaccagaaaacattttgatctggatgttcatgaaagtactacatatattgaaatttgtgagatgcagttaaagacttcctaggagaagttgctagcctttaatgcttatgttagaaaagaaaaactgcaaattaattagctaggggtacatctcaaggagccagcctaaagaaagaaaatattaaagatgaccaaatgtgatgaaatagaaaacaaacatactttagatcccattatgttttacaagcctctgataagattatcaagggggggaaataatacagcacaaataaccaatatcaagaataaaaaaagagacatactaaccaacatttctgattctcttttactagaacttggaattttaaagccttcacagggtctactaacatagtattcaggtttcctacatctacaatgaaaggggtccacctagaaggagtggagcaagatggtggaatagaaggccccaactcatcgtgccccaccttccatccccacagccacagaaagggacccaccgagctccctttgggtggggggaagggttgagaaggatgccacagtcatctcagtccttaataggtcagaagccacactcttaggcaggaaaaggatttctggttgtttatcactgcacctgtcattaaggtgatggcaggaccaaatgatttcataaggtttttcttaaattttgggaaccagatagttccatttaaacttttctgccagaatagaaaaaggaggaaattttacagattattgtttctgttagtgtgaaactgttagaaaacttgataaatagaaatagacaaattaaaaattatggccctgtctcctttattaatatttattattaataattaatagcaaataggtgtgtctataagaaatctcaaaatattggtatgcagatctattcaggagtaaatttaaagaataagaaaccatggctgaattggcttcaccttagacaccaatctccaatactaggagattactaataccatactattttaggaagtcaaagaaaggctggatgtggtggctcatgcctgtaatcccagcactttgggaggccaaggcgagtggatcacttgagcccaggagtttaagaccagcttggccaacatggtgaaaccccatctctactaaaaatacaaaaattagtggggcacagtggtacatgcctgtagtcctagctgctaggaggctgaggcaggagaatcgcttgaacccaggaggcagaggttgcaatgagctgagatcgcaccactgcactctagcctgggcaacagcgcaagacactctcaaaaagaaaaaagttaaagaaaggaaaccttttgatcatctcattagatgccaagaaggtatttttgtctaagttcattattatttattgggtttttttaattttgaattttttttggctgcatgtggtggctcacgcctataatcccagcactttgggaggccgaggtgggtggatcacctgaggtcaggagtttgagaccgacctggccaacatggcgcaaccccatctctactaaaaatacaaaacttagccaggtatggtggcacacgcctgtagtcccagctacttgggaggctgagggaggagaatcacttgaatctgggatgcagaagttgcagtgagctgagattgcaccactgctctccagcctgggcgatagagtgagactccatctcaaaacaaaacaaaacaaaaatgactactaggaagtttcaatttatatagcttgcattctatttctgatggacagccctgctctaggaagtctcagcccttcagatggaagggggacagttatccgttggctaaaactattccatagtgctgaaaacatgatgatatccctctagtgcacaggtgtggattcagtagatgcttgayaattcagttcttatttggtactattattgacaaaggaaaacgataaargaaatatttttctcttcccccatcttttagctttctccctttgtctcataaccatgtccaccaatgagaatgctaatacacaagctgcccatcttcacagatytaagaacaagggaaaggacagtacagtgagtrccttctgttgctttcttatggtgttatttaaatgggaagacatttggaaagggrtgaaaacttagggatctttttaaaaatgtcctcacttagcaacaaaaactgatgtggtaggtgaaacagcatgttatcttttctcaaggaaacgaggcgtcacagaatagaggtcaatgtggagctgaggaaagctaagaaggatgaccagatgctgaagaggagaaatgtaagctcatttcctgatgatgctacttctccgctgcaggaaaactgcaacaaccaggtaaaaaaatatattttagattatgagttacatgaaatccagaaaatcagtagggacttttcttagaaattcaagtaaacttaacatttctagtcttatggttttaactatctgtgaagatctttttctctgtttgcaattactaattatcttctttcctgccttccataatccactgaagctgatttaggatcttcctttaactctgaccttccttcagacttccctgcatttctagctactagctgggtaccttgacctgaccagtgtgtccagagccaaccagtttctggtttatttctttttgctttttcccacatggagtcttgctctgtcgcccaggctggagtgtagtggtacaatctcagctcactgcaaccttcgcctcctagtttcaagcaattctcctgcctcagcctcccgagtagctgggattacaggtacagaccaccacgcttggttaatttttgtatttttagtagagccagggtttcgccatgttggccaggctggtcttgtactcctgaccttgttatccacccacctgggcctcccaaagtgctgggattacaggcatgagccaccacacccagcccatttctggtttatttctgtcttttttggtattctgtgtttttttgtatttgtcaccagctttgttcaggtctttcctcctgaaatatttacagtagcctcctaatttatcgtttccttctttctgtgccaaatgctatttttctgaattttttcctaaagtactgctttagacgtgttttttctctccttaaaatccatactccaaattgcatgaacctgtgaggcagaggttgcagtgagccaagaccttgccattacactctagcctgcgcagcaagagtgaaactctgtctcaagaaaaaaaataaaaataaaaaatccatactccgctgggcatgatggttcacgcctataattccagcactttgggaagctgaaataggaggatcactggaggccaggagtttgagcccagactaggcaacatagcaagaccttgtctctacaaaaaataaaaagttagctgggcatggtggcacaggcctttagtcctaggtattcaggaggctgaggcagaaggatcacttgagcccaggattttgaggctgcagtgagctatgattgtaccactgcactccatgctggatgacagagtaagaccctgtctctaaaaataaaaatccatactctggccaggcacggtggcttgcgcctgtaatcccagcactttgggaggctgaggtgggtggataatctgaggtcaggagtttgagaccagcctggccaacatggtgaaacctgtctctactaaacataaaaaaaaattagctcggggtggtggtgggtgcctgtaatcccagctacttgggaagctgaggcaggagaatcgcttgaacctgggaggcagaggttgcagtgagccaagatcgcaccatcgcaccattgcactccagcctgggcaacaagtgcaaaactctgtctaaaaaataataatataatccatactccatgaaggccttccacaaagtagacctatcttagattttcaaatttatctttcatcttccaaagataactgggcactttcctacttctttttctcacaatatgcttcctttttttttttgagacaaagtctcgtgctgttgccaaggctggagtgcaatggcgccatcttggctcactgtaacctctgcctcctggattcaagtgatactcgtgcctcaacctcccgaatagctgggattacaggtgccgccaccacgcccaactaatttttgtttttttttagtagagacagggtttcaccacgttggccagtctggtttcaaactcctgacgtcaggtaatctgcccgcctcggcctcccaaagtgctgcaattacaggtgtgagccactgcacccagccacgttatgcttcctttagccctttagcactccacatttatcttttttttttttccaattgactactacgtgtgttctatttctagggtactaatactcaaagctcatcttcttcttatagcactccttagcctcgtaggaaagacactcctttctcaggattctctagcgccctgattctgcacccaaaattgggagtaaatgctatgtaacccatctatttaccacttgttttatgctgtttgtctacttgtcacattttctgttaggtgtcaagctcctggagagacagggatactggctttttgaattatgggtagcattggctctcaaacctcctttctactttgattcacaacataaaacatttttttgttgttgggggggcagggcacaggtcttgctcttttgcccaggctggagtgcagtggtgcgatctaggctcactgcagcctctgcctcctggattcaagcgattctcctgccacatcctcccgagtagctgggattacaggggcccgccaccacgtctggctaatttttgcatttttagtagagatggggtttcaccatgtttctcagtctggtctcgaacgtctgacctcaggtgatccaccgcctcggcctcccaaagtgctgggattacaggcgtgagccactgcacctggccgcacataacccatttatatttgcaacaacactcaaccatggaaatatatagattataaaattagatatcaaaattctcagaatgttgcttataacttcatgtctttctccctcaaagtatatctgaatgcaagttattgagattaatgtaggaataatcttcagtctgctctgattcttttttttttgagagaaggtcttgcatggtgataggcacacaccaccatgcctggatttttgttttgttttgttttaattttttgtagaaggggaggtctcattatgttgctcagactggtctcgaactcctgagctcaacccatcctccctcctgagcctcccaaagtgctaggattacaggtgtgagccactgtgcctggccttctagttcattttttaaattattcaaagctgccttttttagcaacgaaacacttggatactccataacttgagactccagtgagtcctgacatcgagtttggaaactgttctacatataaaataatgaatgtttaacaggcaaaattaaatgtaggtctaaatttttagtagctcatgcctgtaatcccagcactttgggaggccgaggcgggtggatcagctgaggtaaggagttcgagaccagcctggccaacatgtgaaaacccatctctactaaaaatacaaagaaattagccggacatggtggcacacgctttaatcccagctactcgggaagccgaggcaggagaattgcttgaacctgggaggcggaggttgcagtgacccaagatcacgccattgcactccagcctgggtgacaagagcaagactcctgtctcaaaaaaaaaagcataatcagttgataccaatattgaaatattgcctatttcaggtcatgttgggcctcttgttaaaacttttggagtacagaatttctgaagtgctgagaaaaatataaggtaaccagcatcaacattttttccttttcagactcctgccctragagccatagggaatatcgtcactggtacagatgaacagactcaggttgtgattgatgcaggagcactcgccgtctttcccagcctgctcaccaaccccaaaactaacattcagaaggaagctacgtggacaatgtcaaacatcacagccrgccgccaggaccagatacagcaagttgtgaatcatggattagtcccattccttgtcagygwtctctctaaggtaacgaagtcttaggatttaatcaagtcatttttagtatttatagaaagctgtgcttgataagcttcttcaygtgcaagaatcttgggttctactaggagtcctttgctgaacaatacccagtaacccctttacttaaggttgtatcratagaaccttggtactttcagtcaycgtttttgtgaaaaagtactcttggaatcttatttgtgcaactgttctgaaataaaaccatttccttatgtttaattggcagattttgagacacaaaaggaagctgtatgggccgtggaacagttgaacagattgtgtaccttgttcactgtggcataatagaaccgttgatgaacctcttamctgcaaaagataccaagattattctggttatcctggatgccatttcaaatatctttcaggtaagtcctatcaaggtggctttgtttgaatttggacttgataataattggtttactatttagacttgggggagggcagctgtaagtttactcactagtaagccacagaatcagaaagcctgtttatgtggccacccctttgattaaaaatgtggcaggcattataaaagatataaaagagatgacaagtggatggtgcgaactgaatcggagtcaggcgcttatgtggactcatcacacctgtttacttggttgatttaatttcccaatttcataccgaattttggtgacattaaatttgaatgacttggccgggcacagtggctcatgcctgtaatcctagcactttgggaggctgaggtgagtggaccacctgaggtcaggagttcgagaccagcctggccaacatggtgaaaccctatctctactaaaaatacaaaaattagccaggcctggtggcagacgcctataatcccagctacttgggaggctgaggcaggagaatcgcttgaactctgggtggggggcagaggttgcagtgagccaagattgcgtcacttcactccagcctgggcgaaagagtgaaactctgtctcaaaaaaaaattttttttgaatgacttaattatatttttcttctggttccacccctaactgatccaagcataccagcatatggcactttgccgtagtgattggtggtaggtaagcccttctcatcaactttggattctagaaatttttacatatagaagttgagcctacaggctgggcatgttggctcacgcctgtaatcccagcactttgaggaggccgaggcgggtggatcacgaggtcaggagttcaagaccagcctggccaacataatgagacccccgtctctactaaaaattaaaaaaattagctgggcgtggtggcaggcgcctgtaattccagctactcaggaggctgaggcaggagaattgcttgaacctgggaggcggaggttgcagtgagccaagatcacgccattgcactccagcctgggtgacaagagtgaaactgtctcaaaaaaaaaaaaaaaattgagcctacaataatggatgctggtgtatctgtcactgtgtataaataatttgtcagtatgtggccagtatttcttctttccttcatctaatcccctaagttattttgaagcaaatctgttatttcatctatagatatttatgtatctcttaaaagttgaaaatttaaagaaaaactaacctacataccattccatgtgccccgtaaatccttaataccaacacacattctgttcggagacatttagtttagcactccataggccatctttgcccttagacaccttgactacaccttgtgatgatataggatgctttacgaaacaatacgcccctgttcccatagcagaccagttgaactggagtgtagtgttgttttaaaagttgcccacgttggccaggcgcggtggctcatgcctgtaatcccagcactttgggaggctgaggcaggcggatcacgaggtcaggagatcgagaccatcctggctaacacggtgaaaccccgtctctactaaaaatacaaaaaattagccgggcgtggtggcacgtgcctatagatccagctacttgggaggctgaggcaggagaatggcatgaacccgggaggcggagcttgcagtgagccgacttcacgccattgcactccagcctgggcaacagagcgagactccatctcaaaaaaaaaagaaaacagaaaaaaagaaaaaaaagtggcccatgtgattttgatacatacaaaaggttgagagctactgattgtaagatctctggctccagtcgaagtactgctaagagtaggtacagatccaatcacactgagtttcaacaaaatatagaatggacataaaactatgataggcttgatgaaggaactgttaaggtgcttatttctgcctgacatatcaatattcaaattttcgatgttttcttcattaaaacattcagagtatacgccagtaaacttggatttttttttttttttaggctgctgagaaactaggtgaaactgagaaacttagtataatgattgaagaatgtggaggcgtagacaaaattgaagctctacaaaaccatgaaaatgagtctgtatataaggcttcattaagcttaactgagaagtatttctctgtagaggtgagtaatggatggtaatattaataacaacttggaaaaatgtaaagccaaggccatgagcccttttttccctcatacttttaaaaatgagcctcatatctttgttaaatatagtaaaatatcagtgtgcataggacgtaatgtacttattgcccctctgatgtttggcttgatggtaataaaatctatttatttatttatttagctttggtttctacaaattattttattagaatgtcagactcaaaaggaactaccagtaacatgcctgaacatgctatatatgatttatgcttgacccgtgacacctgctgtcactggatccagagtgtgaacaagggaaaaggaagtggatgtgggcagggacagcaccagccctggctggccagacctcaggcccacagacgtggtccccataaccaccaggatccctacaatatacacattcctaattcaggctcaactctcctttacccaagagtaaatgcctcaggactcaatctgaatcactgtccgtctcggcttctttcacatccatgctgaatttgtactcctggtcacatcccatgtaagcatcactcatgaagtatagagtgtagttgtgggcaccagtggctggagccacaaagtccaacttcaccttggccttctgctgcaggatcagcctcttgatggagatgaggctattggacttggtgtctccaatcaccacccaccagccctcttcacgtttctgcgggaagagaggcgcaatgacagggcctgtgacttcctcctctcgctccagctgcaccagcaccaccgctggcccgccactgcggatgctgtccttatccaccacctcctaagatagttcgatattagggtagcagttacaaaagcgagccacatctgtaatctggctgtcagtcagctgaagaattgtgttccgttcttcatcctccatctccatgatgtcgaaaacactcttcactcccttgtctgtgcaacgtttgatatgctcagagatgaagtgtggcagctgcttcaggtatgagtccttggaccacatggcttgggtgaccatctgggccaattccatagctgccagagcagagctgagccacccattgctggagaggacatccacgcaggcctggacgagccggactgccttactaaggatttcctccgtatctgactgcaactcagcactcagctgcatgcgggacaggtgagcctgcaggagcaggttggtcttgatgtgcggatcattgaacttagggttattcagcttgtcagggaccttctgagccaactgcctcaggaagttttcttcatggtgctggatggggatattctcgtaccctgctgcattggagatgatctcaataagccctcgcaccttggtcttggcgttgaggtgagattttaaaagtcaccagattagtttcaaatgaacagccttgagaatcttagaatatcttgagggtaagttaacgggtgtcattgtaggaggtgatagagaagtaggccaaacccaccaccatgctctgggcctaatacagtcttttcctattgaaaagtgacggttggggaagaaaaaaaatctcggcctgtttctgttactgtagtagctagcacttatgaattggcaaagtttcagagaccctccctcccctatgtcagatactacaataccatacaggattaaaggtgtaatatgcagatcaagacctagagattaaatacagacttcaggtaggctgctgcttggaatacttattatttttatacttattttttaatatatttccaggaagaggaagatcaaaacgttgtgccagaaactacctctgaaggctacactttccaagttcaggatggggctcctgggacctttaacttttagatcatgtagctgagrcataaatttgttgtgtactaygtttggtattttgtcttattgtttctctactaagaactctttcttaaatgtggtttgttaytgtagcactttttacactgaaactatacttgaacagttccaactgtacatactgtatgaagcttgtcctctgactaggtttctaatttctatgtggaatttcctatcttgcagcatcctgtaaataaacattcaagtccacccttttcttgacttcaccatgcctatgtgttgctttctaatttggggtctttaatgttgctagtgaaaggtaacccgtccaaactgatgggattaaccagaggtagtcctggctgcagtttttacagaagaatgaataaaattttccagaarccctcagccagtgtctccttaagtctccttggccagggagatgcgctaaacactgtaaatttaatcataaatctctcctggagctacaagtggaattcattcctcccaaacttcaaggctgaatgggattccaaggtaaaatcatggctgcacgtgggcctcacctgggaatgtacccagttctgtttcgttgatgaggggcatgagggtccaccttgtgtcttttttaaaaatgtaattcccaagggctcttgtacaatatagattgatcaccactattctttttgagatggagtctcgctctgtcacccaggctggagtgcagtggcacgatctcagctcactgcaacctctgcctcccaggtttaagcgattctctgcctcagcctcccaagtagctgggattacaggcgcctgccaccacgcccgactcatttttgtatttttagtagagatggggtttcaccatcttggccagatcccagcactttgggaggccgaggcaggcagatcactcgaggtcaggagtttgagaccagcctggccaacatggtgaaaccccgtctctacttaaaaaaaaacacaaaaaacaaaaattagccggatgcgctagtgggcgcctgtaagctacttgggaggctgaggcagaagaataacttgaacctgggcggcggaggttgcagtgaactgagattgcgccatttcactccagcctgggcgacagagcaagactgtctcaaacacacacacacacaaacaacaacaaaaaataaaatggaacactaaacccctgtgttacacgtggtcctcgtaagcatagagcattttgtttggaaccgtggatcactttctcagcttttcctgtacaaaggctcccataaaggggagggggaagagacattaacagtacagactgcccttcctttcctacttacttgctcctctcttcctctccccaactcgagtcccttcttggatactgaatccaaaagtcttcagcttgagaaaaggtgatggggaagtaaacctggacatcctagatttttgctttaacatgggagagttttaatggcttcagaaagactagtgtaaaagacaggatagaaagcgtaaggtctggatttgttaaaggaagcatgactcaatagtgaggtaatgaacaggagatagctggtttccaaaaaagttttttttttcatatcttagataaaatgcttaacatgctagtttccttggagtggttagatccgtagaggcattgggagatttttatttaatttatctgtgggtaacttaatatctttgagaatgacagaatgactttataaccagcttgatttgtaaaagtcacgataaaaacattgtgtagccaccaacttctccctcttgcagtgttaatgtctaaactgctagtgatttattaatgtaccaacatttttagtttcctagcagtttgaaagctttttttttttttttttttttttttggagatggagtctcgctcttgttgcccaggctggatggagttcagtggcgcgatcttggctcaccacaacctctgcctcccgggctcaagagattctcctgcctcagcctcccgagtagctaggactacaggctcccgccaccacacttggctaatttttatttttatttttttgagacggaatctcactctgtctcccaggctggagtgcagtggcgcaatctcggctcactgcaacctccacctcccggcttaagcaattctcctgcctcagcctcccgaataacggggattacaagtgcccaccaccacaccagactaatttttgtatttttattagagatggggtttagccatgttggccaggctgatctcgaactcctgacctcaagtgatctacccagcttggcctcccaaagtgctgggattacaggtgtgagccactgtgcccggccatctagcagtttgaaatgtcatttaagactttggtagtgttaaagagtgcaggggctggcggagaggagagctagaggcatgggtggggaacatgttggaattggagctcagcaggaagtgggaccagtgcctggcagatgcggtggtgaagacaggtactggttttggattaggaattgttttctcacttctttaaaagaagaatgtggccattagccttcagttctggcatgggattaggaatggcttactccaactgtcagcatgatttccaggctccatatcttctacatggaaaatatgtcaaagagcaggagcagtgacttcacctgagaacgtcccagtgggaggacaagagaaatcatgtttattcctcaggaatactgaagtgtcctgcagtaagctgccattcttctgtaacaatgttatcagtaatgctttaaactccagcacctggttatgtatttgaaaccaagtctgtttcttgttttgtattttttctctggaaattgtagggaggtggtcttaaataaattaaacaaaaataggggaaaaaaagtctttgataggctgggcacggtggctcacgcttgtaatcccagcactttgggaggctgaggcaggcagatcatctgaggtcaggagttcaagaccagcctgcccaatatggcaaaaccctgtctctactaaaaatacaaaaaattaactgggcgtggtggcaggagttggatgttgcactgagccgagattgtgccactgcacttcagcctgggtgacaagagcaagactccgtctcaaaaaaacaaaaaaaacaacaacaaaaaaacactttgataaattatatatctttacctataactttcatttttgtatttgtttttgttgtaagcaagggaggaaaggtaatattcctaatatcatttggcaattatcaaagtaaaaactgctaagacttattttgcttgttgaaataatcttaaaagggtaactttaaaagattggacatcagtgttaaacatttaacaaagtattgattctttcattgctatattgcatttttaggacaaaggaaatcaacattctgtttcctaatgttgattttttcccctctcatcctcaatctttctgtcactgcatcatcactgaagaaaaaactcgggataattttttcattactgtaaatcctcattgttaagtgagatttttatttcagcatttggcctctttaattgcataaaagcagtaagagcaaagtcagttttgttcataggagccattggaaaccttgtcagatacaggacccaacttcagaaggccattaaggcctggctgccccttacccctctccacccttgctggagcttgccaaaacccggtggactgattttggaaagcccttgaaacatgtcatttcactaatggtgatttcttttgggattgggatgttgacctaatttgtgatgaacaaaacccggccaaatcatgcagcctgcctctaactccccatgggaaagtgttagagaaaagtgttttagcaacatcacccatttaagtttcataaccccagctaataaagatgataagaaacacccaagctatcaactagggttttttgagggcagaagtgcaatttaattttgagcacttgcatgttaaacgacatgttggcatagtttgaaagctaattctagtgtctgtgaacgctcagttcttcctaaatatttgggacagtttcataacactgtgtgggaggtgtatgcatcgaaccctcttaaactgatcagttcgtgcgttccaggcttttcacaatcgtaaatgtcttttcccatcctagttgtgggaggtagcatggtgcagtgaagtggactggtatttaagagccagatctgtctgaattcaaatcctgcctctttattatgtcagtgaaagaccttttggtggggcagctcagtgctggcataagaaaagtatagatactaattcctacataatagaaatatcctagatgagtattacggctattccaaactttttgttgttgggaatagctgtaataactgaagaaacaaagtttcgctgtgttgcccaggctggtctcaaattcctggcctcaagctatcctcctgcctcagcttcccaaagtgctgggatttgcaggaatgagccactgcacctggctgcctccaaccttttaacaccaaagatttctgtttgttcttacatagactcttgttttgatatattttaccttctagtctaagttgattattactcttcttttttttccccttatcaatcagatacacatcaacataagatgaccatactggattgtttacatacttaatgatgggattctactgaaaagtcagatgttttgtcagcctttaggtcttttacgggcttggcatagctctctgaacagtggaactggctcaaggagagcccactgtgactaagttcctagactggctgttagcctttgcagtatcccagtgagaggtccagctgtcttcttgtgcccactggttccctttctcttaattctattggacagactaattggagcacctcctcacctaacttctcattggccatgagaacaggactgaaccacccaagtccaacttggtgatggaagcttgtcagtatcaatacctgatagggccctaatactagtgttaatgaagtttcttgaatgagcaaacacttgactgttgagacagccaccacaaagccatattttctactatgaagaaactcatgtttagaacttgaacaagtttaggcagaaatattggaagcttatccataaaaacaagggaatatgaggaaagattggatgaataagaaaactttaaatcaattcaaaattaaaattaatggtcaaggtatgatacccagaaggcatctcctgattgtggctgcaaaaaatacatattttaaaagcaaaactattgaaatataggagaaatgtagaaaactgtgtataaatgaggtggtctttttctttctttttttttttttttgagacagagttccactcttgttgcccaggctggggtgtaatggcatgatcttggctcattgcaacctccgcctcccaggttcaggagattctcctgcctcagcctcccaagtagccaggatttcaggcatgcgccaccacaccaggctaattttgtatttttagtagagaccgggtttctctatgttggtcaggctggtctcaaactcctgacctcaagtgatccacccacctgggcctcccaaagtgctgggattacaggcatgagccaccacgcccagccaagatggtctttttcaaccctttggcttagactaaagttgtaagtgaccaatgactgtcaccctactctgttcttgcccattctttcaaccaacgtctcaaccactcagcaaagattaacttagggaacacaaagctaattcattttccttcctttctttctttttctttctttctttctttctttctttctttctttctttctttctttcttccttccttccttccttccttcctttccttctttctctctctctttcttttttctctccctctctctctctcctccctccctccctcccttcctctctccttccttccttcccttccttctttctctctctcactctcttttttctctccctctctctctctcctccctccctccctcccttcctctctccttccttccttcctttctctttttttcttccttttctctttcttttctttctggtaattctttaaaatgtatttttggtagttacagaaataatacttattttagaaaatttgaaaaacagaataccacaaagattaaaataataacctaaaacaattaaaataataacctaaaattctaccattggattttatattttggcctgaataagaattcttaacctgtgtaacctgagatccaagataggttatggggctcctgaacctctgaaactgtatgcacagtttactgttaaatacatgtgggtgcttttcaaagaaaggggatcacagcctggggaaaattaggccctcaaaggcagagctaccttcaaaatattatgagtttcaggtgtagttcctttccatttcttttcttttttttgttttgtttttctttttttgtttcttttgagacaaagtctcactctgtcgcccaggctggagtgcagtggcgaaat

SEQ ID NO: 94501 - DNA, 271668 bp, Homo sapiens
  misc_feature (1)...(271668): n = A,T,C or G
gagattctgagataacaagaaccatgtagccctgaaactgatccagatcgggttcattgttctactactcctttcttgtaaatgccctgattgttggaaggacttcttatgatgtcagtctataaaaaagcggaggccaaaagtctttactggatacccattatgtgcaaagaagatactatactcccctgatagcaagagatacattattttagggagtgtttctcttgctgatgccaacagcctattccaggatccagttttggctgtggagcattcatcacttggaaatgaattgttagaatgacttttacaactagagttgccaatagtctggcttggtgttaggctgtctggtttaaagctgggtcatctagttctggaacacatggttcagatagtatttgaaagggcaaattaaatgcaaatcacctggttttggtgagtgggcttgcataacaacaagccctgtaggatctattgttcttgcttgtgtctgagtgtctgcactgaaagggatattcaggagagcccttgagggaaagtccagatcactgtcaggagctggttcccagaggtgacatttagcacccataaatttaggtatcttttttttctttttaaaaatcttaccagcttaattgtaatgtagtggtggatttatattactttaagtttaattcctgaaattttattagtagagtagaaaagtcctctacttctaaatccgggtctctatctgtggcttaacttctaacttcttgtttgcattctcttattctcttttggttcttttcatgagttagttgagtaataagtaaaacttaattgtgagtcttttcatggaggatggaaaatcccacacaggaaagggcactaccaacaatgggtcagtcgtttatgttggccaatgtaaagaaacctcctttatttcataaaaggttaagtaattggtggggaaattggggtgggggaggagttgagttaccttctcttggtgaacttcggcccaatacacagtggaaagtgccagataataaatgaaactacaagaggttagaaaactatactttctttttagatattaaaggctatgagggcatatgttacttcaaagacttgttggatctgtttttgaatgggaggcaaattggtttcaatcactagagagaagggggcgtggtggcccaggaacattattagtgtactgtactcctgtcacctgctgaggtaaggaggttctgaataactgctctggggtgcaggaagaaaatactaaaactttgaattatctttattgatatcatccctttaaaatgtctgtttatgctgttttatggtgtatggaaaggatatgcttggggaatactgccctagagagaggagaagacagatggttggatcaggatgaaaaaaactggagatgtggagtagctcagaattcaaaggtctcataactgcccagtgggttctcattgcctgctgcctggacagagccaatttattaagacaggggaattgcaacagagaaagagtttaatttacacagaggcagctgtatgggagacaggagttttattattactcaaatcagtctccctgaaaatttggggattggggtttttaaggataattttgtgggtagggggtcagaaagtggggaatgctgattggtcgagttgaagatgaaatcacaggaggttgaactgggttttccttgctgtcttctgttcctggttaattctgtaaaccattcaggagcaatatggggaggttcagaatcttgcagcctctggctgcatgactcctaagccataatttttaatcctgtagctaatttgttagtcctacaaaggcagactggtccctaggtaagaagggggtttgtttggggaagggctgttaccatctttgttgcaaagttaaactataaactaaatttttcccaaagttagttcagcctatgcccaggaatgacaaggacagcttggaggttagaagcaagatggagtcagttaggtcagatgtctttcactgtcataatcttctcactgttataatttttgcaaaggtggcttcagtctcctatctgttctgataaagaaaatgtagtcgcatttggattctggagagatagtaaagaagatactgacctttgttagacaatggcttatgtgacaggtgctgggttgtgtgctatttattcttattctatcactgcatatacaattttcatatgaatgcatacttttatccatttgttatttatttaatgaatatctcatttaatcttcacaaacagcttgagaagaaggttttaatcttcccaattttgcaaccaggaagttaaggcttaaggtgggtgagtaatttacacaatgttctatgatttacacttcagcaattctcattctttagtgagtaggtttgcagtgtagactccagtgtagactttaggagattcaagtgggcttctagtctgcttggagcaggtggatagttcaagaatatgcttatagaattatgaaatactttgttctgattttctttcattatttagtgcatattcccaaattgcaattttaggccagagctacttctctgctgtttaggctgacaccaaggacttggtttgacatttcaatcaactcaatcttcccttgttggccttaaaagcaagcaagcaaacaaacagacaaacacaacaaaacctaaaacttctgttatgactaaattccaggtaatcaattaaatcttaatttattttattgttattaaattgaattgacataaagtgactaaatctactatttgtcaatcccattctcaatgtcagagacttaaattgcagaatctcctcatctgcacatctgattccttccagcagctgataagcatcacaggagcaggaatcatattttgttcatcttttctatgtcccacaaagtgtctagcagagtatttgcatttgttgaatgaaaatatgttagatcaatttcttccaactgtagatttcaaactataggccaggccatcccacttgttacaggtagttaatctgtttatctaaaaccataattcattggctttcttagctatcttggcagttaggcaagagatatttacaggttctaagaaacataagatgctatttattccgttgtatattagacttatagttgtgtggtttcagattcttaagaataaaaatttccatctcttcgttttgatgaaatgtgtgtaaagttggagaacaaggtaaaagagtgagtaaattcagaattctttttttctctcaaatgctcagatacttaattaaaattcctttaatatgatcacgagatttttgtcaggacaagttgagatgatccttgagaaagcactttgaaaactctagactacagacataaaggacgtttgtcaaaagtaaggctttaaaacaaaataaggcctcttgaaaacacagacctggcgttctgacagtgcacatactgcctaatagggatgaaagtttaagctctgtttagctacctttgtataatgggaataaaaggttttttttttcttgtatcctaaatcgagaatttaaactgttttctgattagcaagggtttgcagtcacactagtaatagtcctctataagatggacatccttctctgttccccgtctttctactccttatgaagaaaaagtagaaatttttgaaaaagttgtgctaggtatacataacatgacatttatcattttaactacctttaagtgtacagttcagtggctttaagtacattcacagtgttgtataactatcaccattatccatctccaggacttttccatcatcccaatctgaaaccctgtacccattaaacaataccttcccatactctcttcctgcagcccttggtagcctctactctttctgtctctgtgaattcacctattcttcttgctgagccttgctgttatcattattcattcgacattattcattattcatgagtgcttattatggacaccaggagttcaacagtaaacaaaagtccctgctctcaaggagcttttattttagtgggagggagacaataaacagcgagcacatttaaaatattttttaaaaatgagattatcttatacacaattcttctgcaacttgatcttttcacttgacagtacatcttggacatctttttctatgtcagtctgaagaggcctatctcttatttataatagctaaatttattgagtctctactttgctccaggcactgttttagttgcaacaatcctatgaggtaagttctataatgatcatctttttacagatggcccagataagtgtaggagcttgcatagtcacctggccagtcactggtggagacagaactaaactcagatgacctgattccttactccaattctaccctcttttgaatggctacatagtactcttttgtatcaatataccttaacttatttaggcagtctcttatatgtaagccatttttaggtgtttttttgttgttgctatcatagtgctataattaacatatttagagatatgtttgcacgtgtgtgtggttttctataaggtaaattcctaagaaataaaaacacatacacatttcaatacttgataggcactactatactcagtttcctttaaaaaatattttaccaatttatattcccactaacagtataggaaaaggaaaaggccctgatttccttatatcttctttaacaaagggaattaccaaacttatatttgccccatatgataggtttaaaaatggtatagaggtgatacttaaaaatgtttttcacttaaaagtgttttttattttaaatattttaaagagatgattgcttcctgctctaagctgttcttggtcctcttttatcatgtaagaaagaaagccatctctcttatttccagaaatctgtagtttcttgttactgtggaaccttggtaggaaaaggcccttgtttctgtgaaaacctgagggcccagcgtgaggatgttccaggagagtggagttgatggtgcgcaggggattagcttgctctggttatagagacatgattaaaatctatttgatttcagtacttaactggcaaatctgatgcaacttctggaaaattcctagatggctttaggcatatttaaaagaagccatatttttccttttaaaaatagatatgcaccaaaatattttattttcatctaatcccgctttaacaaccagaatccccttaaaagcaattccaaactaaaagatgtaaatccatttcctatgtgcatttgttctttggtaccatcagggttaatgtttgcatcctctgtgctgaaattaaggatgttgggaaagaagtgtcattgctttgcctactaaatgtcacttgagtatgcttagctttcatccataagagagctgaacttcccctgtaaaaaaaaaaaaaaaaaaaaaaagtgacaaaaacccactgctgattctttcatctctgcaaaagcaggtgggaactgcaaagagatttgcttatcttcctcagtcaagggctggtaaaagtttggtaagtagacctggtagccggtgtccccttccattgttcattttcatcctcctgaattcttgattcccacagaggaagccatcctcagaagccagcctcttgggagtttccttttgtttccccaagattaaccagttctgtcctgtcagcaggagcaggcaactaggggaggagaggctcttcagggctttcagcatttttccaaggagtgcttttctccctcaattcctcactggcagtgaagctgctttcttgtaaggtcttcctcttcttctgatgagatgctgattctgattgccatctagcagcttccggtggtggtaagtggtcaagagtgtttttccaggagttgatctcaggtttttgagaatgccccctagagacccagtttgttttctgtatcatccctcaagctttcagagtagccttgcttttctccttggcatggtcacggaatggatacctgtttgatcttcctgcactgctgagaaawcttccttttgggggagaggattaagtctgggttgaggtgagtagatgggtagcattcaatggttagtgagatgaagtggaaatttagctgtgggctggttggaacgatctgtttcttttctccagatccctattttgttttgctgttttcatcttggtgactaaggtttcacaaatattctttattattccccttttgctaaaaaataaatttgggggagttagttggaaatgggagatgtgacattttcttttttgttgtttgaaatgtctattttttactctgttagcatgcctattaaatgaccaatgatagtagcataaaggtacatttcttcttggtttgtaggtctttgtcacttcctttggtagtagttggttttatttttttcacggggtttgtatacagtgcacctattcaatatattgtttatggtcaatttatgctttagacatgaacagtttgcactgagctatccctctgaggtttgagggttatgtttttagtgctaaaatttgtctgaacagaaaaaggtatccttctagttgttttgtttataggcaagagagtgtctcaggtccctggttaacaattagctgttttgaagaaaagaaaactggtgaaaaacattaattggaagctgaagtcttgttagaaagtaaatgaggaaacacaggttttcttgtgggattaccaacacctgtgcccatgaagtatccccttttactcagctgttgctccatgctggcctttactacaaaatgtaaactcagagtgatttcagttttgatttttttaaatgtattttttattttttatgtgataygtaataactgcacatatttatggggtacatgtgatattttggtatatgcatacgatgtgtaattagcatatatatcacctcaaacatttaccatttctttgtgttgggaacattccaaatctgctagctattttgagatacaataaattatcattatctatatcgtttattttatcgtttatatctatatcgtttattataaataaaaaataaattatcattatctattgtcatactaccgtgttatcaaatactagaacctgttccttctatctgactrtatgtttgtacccattaaccagcctaccttcacccccttcttcctcttccccttcctaacctctggtaaccaccattctccctctctaccttcatgagatcaacttttttagctcccacatatgacagaggatatgtgatatttgtctttctgtgcctggcttattttgcttaacataatatcctccagttccatccatgttgctgcaaatgatagagttttattctttttcatggctgaataatattccattgtatataaataccacatttaaaaattttattcctcaagaagaaatattattgcttccatatcttggctattgtgaatagtgctgcaataaacaggggagtacagatatctcttcaaggtacttatttcctttcttttggatgtattcccagaagtgggattgctggatcatatggtggatctgttttcactttttttgagaaaccacagagtgatttattttaacctatattgtgcctttatattgtctcatcatgcagaaatatttaaaaatgagggaacaaatgattttttttgtgcccctggaggatttttttgtgggtgggagaattttatttttttcatatgtggcatattgaatattttcatttagtaggaaaagagttaactaaccatctaaaagtaaattggaaattgtagctgtcattgaaattaaacttaatgtatgtttggccagatgcagtggctcatgcctgtaatcccagcactttgggaggctgaggcaagtggattacttgaggtcaggagttcgagactaccctggccaacatgatgaaacrccctctctactaaaaatacaaaaatttaccaggcatgktggtgggctcctgtaatctcaactactcaggaggctgaggcaggagaatcgcctgaaccgtgtggtggaggttgcagtgagccgagatcaggccactacactccagcctgggtgacagagcgagactctgtctccacaaaaaaataaataaataaaaaataaaaaacaaaacttaatgtgtgtaatctaaattcttgtatagcatgagtaagaattagaaacaagtatttatttttagaatctctcatgaaaagatattaaaaaatagtaacctcctagcaacattatatatttcaaatattaataaattctaattaaatattaaatattattgatcgttatgtttttggaaacatgttccttccttactttaaagctaccttgcttttctctctccttttatttactcaactggagtttgagtacctacccagtgccgggcactgtactagatgcctaggggaaaaggtcacagagggagggccacagcatttcatttcaatggatccttcactgacctttcttttgaagttgagcgccctctagagctctgtccttgttcctcgtcctctgtcctttcctcacctctctttgttcttgtcctttctgggtgaggtcattcattcccccttgacttcactccttccttatatgttgatgattccaagtctacaaatctgtctttttgtctttagtgctgtgaggatgttttcaatgatcaagaggcattttaagcccacatgttcaaactaaatacattattttttcatcccaattccttcttctgcccctccaccttctcctccttttcccttcactgctgtatttatcatcatagtggcacctctattccctcagtgtcccaaggcaaaaacctggaagtcaccccagattcctccttgttctgcatccaaacacacagaccatttattttattttattttacttgaacagacagggtctcactatgttgcccaggctggtctctaactcctgggctcaagcaatccatctgcctcggccttccaaagtgctggaattacrggcatgagccaccatgtctggcccatacagatcatttatagactgcatatttaactatggaaacatttctagaattcagccccatttgccagttgtcattgctcctccatctcctcttgtgccagcccaaactgtgagattaaccttcctaaaatccctgacagcctggactggcacagagagacaaaagggaacaaggataatggaaaagagggctgaattctaattgtgccattctacttagatacctcttctgtctccccgcaacctgcaggagcaaccacaggatcttgaccatggcaatgctctctgtcaccttatctataaaatgrggataacggtaattcctgctcgtagagttttggtgaggactgaataagacaacacgtgtcaagttcttagcacaaggccaagtccccagtgaatggcagtgacaatgaggacaatgatgaagatgatcctgtctttcagaatccagctcttacctgccttgccagccccatatcactgcacattcttcctatgcctgtatgatctgcttgccatgactatcactgctccgcaaaccttccttccctttcacaacacttggcctttcctcacgctgttcctttgacttgtccttaccttgttttatttagcaagctcttcttttccttttaaaaggactcaactcagaattgccatctgtgaggtcttcgctgactctgcaaagcaggcttggtgactgcctttcctctgcctccatagttctccatccctccttctaccatagccctgcactcatcatccttttttaaaatttttatttatttatttattttgagacagggtcttctgtgtcacccaggctggagtgaagtggcacaatcacagctcactgcagccttgagcttctgggctcaagtggtcctcccactttagcctcccaagcagtgggactggaggcatgagccaccatgcctggctaattttttgtaaagacagggtttcgccatgtttcccagactggtctcaaactcctggactcaagtgaggagatagagggcatctgcccaccttggcctcccaaagtgttgggattacaggtgtgagctactgtgtctggcctacactcacgattcgaatggtcttttatgtttctgtctgctctcatcttccccagactgtgggcttttgaaagactggaaatgaatttttgcctccctcatgcccagcccatgttagctatagagtaggcacctgataagtctttgataattgaatgtcagtagagggaggacatggttctcaaatttggtaggaggttttttccatgtggagagttaaaaaaatacattttaagaaaaataaaaataatcatcgctttcccttattgagtactaactttgtggcagcaggcattgagctaatttctttatggagatggcttggtttagttttcctagtgatcctatgagttactctgattgtccacagaggagaaaactggagcttagaagggaggggaacttgcttgagattctagggttaacaggagcaaacttgggcggcctaacgccagcactggtggagcaatagggaagtgagaagaggaaggaagatggccaaagcagggttgagagaagagggacaggatgaggacaaggaggggaaaatgagaaagagaccagcaagagcagactaggaaaggaagagaagggaaggagaaaaggaaactagaatgcatttctgtaagtacttccaatgttgcctgaagttttgattgaagtaactcaggaatggaaaaccaaacatcgtatgttctcacttataagtgggagctaagctatgaggatgcaaaggcataagaatggcacagtggactttatggactcagggggaaagggtaggaagggagtgaggaataaaggactacaaattgggtgcagtgtatactactcatgtgatgggtgcaccaaaatctcacagatcaccactaaagaacttactcatgtaaccaaactgtttcccaatagtctatgaaaattaaaaaaaaaaaaaaaaaaaaaaaaagaaactaggagaccaagaaggaaaatgaacaggggatatgtgagaggacgaagagaagctttgaaatgttgtggctgggtaatggctgcatgactagaatataaagagactcctgtatggacatgacaactcacaacaattaacctgctgtatgttatacagtaaatataacaataatttattgttgaggcacggtaattgcatatacctgtagttgcaagccatttataaatttggcttttttttttttttttttttttgagatggagtttcgtgttgttgcccgggctggagtgcaatggcatgatctcagctcaccgcaacctctgcctcccgggctcaagtgattctcctgcctcagcctcctgagtagctgggattacaggcatgtgccaccacgcccagctaatttttgtatttttagtaaagacggagtttttccatgttggtcaggctggtctcgaactcctgacctcaggtgatccacccacctcggcctcccaaagtgctgggattacaggtgtgagccaccgctcctggccttataaatttggcttttacacacacccatactacacacatacacacatacacagattggcttaattttttttttacttctacttttgtacagttcctacaatctacaagcactgtggctattggcagctgtcactgataccaaatagaattatctttagctcccaccctcaccctcacactcaaaactgcacacatgcaggacagaagcctgggcttgttcctttttctctcgctgtctcagctcccaaggctgagattactctgcttcatctggatcgcccatctctggggtctcatggctgagtttcagttccccaatcctacctgctcctcagggggccagcactggggctgcaggtaatattttgggttggcaggcagggatgcctgtgggacagcaaggtcacccctacatgggtcccagggtgggaggactctctgaggctttgctcttcaggctctgggaacctagggccagagggaggaagggggaagggctgggcagctggaggagagaagggcttgttccttcctcctgtcatccttgcttgacatcctaagacccagctcctgctcaagaccacactggtgcagccctcacagggagcctcttcctctccacgcttggttgggttagtcctcagagagatggtgggttgggatgggaagcaggggccttgttgagaattgtgaaaaaatgttagggaaacggaaaggaaactgggagagaaggagatggagtaagaggagaaaaagtagactggggaggtggaaatgagatggagggaacacacttttatggagtgaactgttcttacctgtgtacttaacctcacacagcttggaggaaggcattcccatctccactttacagatgtggagattgagtctcaggcagggtacatgacttgctcaaagtaatgctagatagaaagccactgaactgggacttgaaccttgctattctaaaagtctctcctgtgtaacactctgcctccaaagaggagaggaggcaagccgaacggaacagagaaaggagcatagaaggagatctggggttgggcacgttagatattgagtctgggcttgggcatgttccatattgggtcccttcctccttggcctgctttttcctgagtcttcagagaactggagagcacccacacccaaaggaagtagaagatccccaccctggtggggacacttcagttactccctaggctctcagataggagacagacagggaggggctcgcctgggcaggtctctgggccagcaaggggggctgccaaggctctgcctgtgctttttcctggcctgcactgttcctgtctcttcctcaactgccctggctccttccttttccctttttccaatctcctctaattcctttgcttttctgtcactctacttcatattttcaatctttctctttccactggccccaacccctcagtttaccacatgccctctagctcctcactgcaaacagagcttctctttaagtcccatcacctgttcacccttatgtccatttatttatttatttttatagagaccaggtctcacaatttgctcaggctggtctagaacttctggattcaaacaatcctcccacttcagcctcccaaagtgttgggattacaggcatgagccaccccgcccagccattatctcctttcttttattgcagaatgtcttaaaggagttacactcgctgtcctcatttgttcctaatgtttatgcagaaatgttgacaaagagacatcaatggtctgcctttaagataactaatatcaaatgtacactctcattatgtgccctgtccccacgacccacccaggttggctctgaggtttacagagcttatttgccccagattctgtaatgagttagtagaaaaagcaggaatccaagaacagggcgtgtggccccaaaggacaggcttctaccatgtcctgcttccccatccccccgaacagctccgagggctgttctcttggatggcttttggtgagtttactatggccagagtgggccatttgtcctgtagactttggaccataattcaatagcacacccaaaacagatctttctgggggcagattaatagtagctcaggaaactgatgatataaaataagaatgacaatttattaatttaaaatacatactctaactgtcaggagaaccagaatgttcacttcagcatgacaagtgcattctttccctgtgrgcaggcttctgtgggaaagcaaattattatcagcaggttgcttggtgagcatggaatcagagcaaggggaattagctgtaataacttgactgctgaacggcctcagatcattaaagagactctccattttaattctttgcttaaagtgttgagtcacctgcacccagatgtgcccattttcactgtaagaagagacttccttgtggaaggctgccctcttcctcacaggatgcttaaatagcagttccagcatggaggtcttggtatcttcaatatcaaggtgtctaaaaccaactctttaatttccctgtacaaactggcatcttcttttgactttgctatttcttgcattagaaaactattttctgtgaccaagattcaacacccaaacttgaaatgtaaaaaaaaaaagtatttatggaagtatgaatttcaatctttaaaacaaatatgcactgctttttaaattaatatatgtaaagtccttagctattatttgctacattcctctctctactttctcacacttcccttattaaaagcaaccctctaggattttcacatgaagaaactaccattttaatccctggcataagatgaagctaagggtaacataagactcatctagcagctttcccttttccatttcctctactttgaggcagtttttaagagggagaacttattcttgtaaatattgtttgcttcagtacttgtaaagggttaaatttcaaaatcctaagttcctgcttctagagctagacttgactttagcaaacctttttctttcaactgattttgtttaatctatttccttagatctttactgttccaaaagttcaatgaaagatgactttttctttactctgacaacctttagaggtggagcgagtgtcagtggtggtatttcggtgagttgataaatttgcaagaatgacaggactaaatgttgcttctagagttaaactagaatctgctacattactatgagtcctccrtaaagtatacctgattgccattgctactagaaaaagactggatttgaggaaacatggacttgaatgtcaattcttattttttcgatgttactttatgttttagagtgacaacacttgactaggatcattaataagaaacaacttctggaaatcttatagaaatattgtttatttcatgcaatagtgattatataattaccgtgacagaatattttctacaaaatgaaaaatggctaaaattgaaaaatggatttattcagtatgttcaaaataaaaggtttcaaagacactttggaagatggtattggagaaattaacagtagcaacatagctgtatgttttaaaagtaattttaggaagaatatggaagaatatgacattgctttatgtttgaatgtctaggaacttttaaaatgagaagtgctagcaggaagatctaaaataagatagagaagaggttacatggatatattctccttagttaccttatattacacaattgtattaagttcatgtttgttaactgttagtaccagtccctcacaccaatctagcatccaataaggacaaagaaaggataagctgccaagtgcctggtactttgattagctttctgagagataaatgtcttctgcttgcattctcattgcygctgtttgggtgtagagtccccttttttttcatcttgcttgaagaattgttcttcctttcctctgctctggggactcagccaatgaacacagaacatgttgacttagtcccactggagaattttcaagccctgacaagttggcttagagcttgctgatgagcctttaccctctggccaagtggggccaccagatacagatgtcgttgtcacagaattcattcacctgcccaataccattttgtatttgttgctatgactattcgtgaaacaaaaacaattttgttttttgtttgttttttgagtattttgtgaaacaaagaaacaacaaagtccttcatggatgaaaactcacttttgtctgtggtatttttgacaggaagtctttaccaccaaacatcctttttgtgaatcttcctttataactctagtgcctcctctccccaggtttgctcattttctcttctttcttctgctcttcaatttgcctgcagcactcttcctattgctaacccagttttgctcatgctttgaggttcttcccaggctgaagataagggtgtgtaggaagatagggaccagaaaacaggagggagcagccaaaaaagctgcagccactccagcttgggaaggcagatctaggacattttggggccggggtctgggatccagggagggatagttgctaaaaggaaagtgtcttttagcatctggaagcccttcctccatttctaatataaattaatttttcattcaacaagtgtttactgagcattactacgtgccagacaggcattagatgctggagatacagctatggagccttgtcctaaaagagtttgtggaataatggggaaatagccgatataatagaaaaatgtattctagagtgataggggctctcacatgggcagtgccaggttctacgggaacacacaggaagtgctcctcctatctctgatttggggaggtcagagaaggcctcctaaaggaaatgaaatatgagttgacattggacagatgaataggagctagtcggataaagggggtggagacagatggctacaggcagagggaagagcatgtgtgaaggcccccaaatggaaagaggctgagttgtatatttctggagtgcagacatgaggcggtgcagggaagcatgggagcagggaaggagagtgatgaggaaacaggctggaaagatgagcagggatcaagtcgcagaaggtcctaggagtcatgttagagtttttttcctgaggccaacaagaggtgtttgcagggtttttagcaggggtgtgacatgatgccattcccctttataatgataactctggctttgatgtggagactggtctacaggtggccaagcctggaacaagggaggaacatagagggagagcaagcactggtcagcaggcatgtcctggagataacccactgcctggggctggggtgggggagtagagaggcggggctaggagggatggtcttgggcagccttgctggcagctggttgaagatgtggagggagcaacaggggagttactgatggggtcatatttgatgacctagccttgcttttagcaacacccggcagcgacacccctatgtccttgcttggattcgtaagttttagtaacctggcccctagaaaacactgggtcctgcaaagtatcactgaccctatttgttaggcatactccaggggccagaaaaggaagaaatgatggtctcaggctttttagacttctcggggatctgtagtggagcagtgcgtgttgatgaacttcctctgcaacctcttttcttgtaactactaagccataagtgttgttcttccccttctctggtcaccatatgactgaccaacttcttctttatgtgtgttggccgcatcctgccacaccactttcctgagcaggaagcaaaccagtcattttttttctaactgaaagagcatgtggtcagtacctctgcctgcactgtcatgtgtttgcaaaggtgcatttatttccttggtcttttgggttttgaatgtttgaaattacttgtttgctccttcatttatcattctaaatctctaagagtttacaatgtgaagaaaattagaccacatgtagggaaaaaatgaaatataataatgatattattctggtttaaaaaaaataactgcctggagaagactacgttcatgrgaataaattgaggaaaagttttggaytgcattttgtttctctagagcctgggcaataatttcctgtcacacatagctctcgaagttcagttgtggttctcagctgtggcttgtgaaagaatcacctatggcatttaaataaaaggcagattctggaacctcacccctgagatattctgattcacaggatttgagatatatttgattcaatttgaatgccaaattgagtggcgcatttgtgcttaccttgagttgtctcatacggcctttaaaatacaaatagattatttttgtacagaattattcttatctggctggactaaagcctcataaattaaatctgttgttctttcctgtgtcagtgacttcctaattacctagatttgtctaggaagaaagttaaaggaggtaaatttatagttattgtgcatttttcagatactaatatgcatacttctttttcttaggtaggccacctgttgagacctggtgaaagatcaggtataataatgttctgcagtgaaaagaaattgcgtggtaagttttgagttcttccaatgatgcaaagtgatattttaaaaatataattttaattttttcatggaagtttaatttatatataaaaagcacacaggtctaggtgttcagctcagtgaacttcgacgattatatacayccatgtaactacaaagggtgtataaaacaagatatagaacattgatttctatcaccccagaaagttcccttgtgctccttttcgttcattctttctacactcactgtgaccatcttttgatttctgtcagatcagttttacctacttttgaaatgaatataaatgaaatcatacagtatgtgttctttcgtattgctgcttttgctcagcataaggtttttgacatatacctatacagttgcatgtattaatagtttgttcttcattttaaatttcaaagcagtgttccattgtgtgaacacaccaacatttaaaacagagttcgtatagttagaaataattttgatcatgatagcagaaaacacactttgttttttaggttgagtaatttggttgagtaattaatagtattattaacacttttcagtttgctgaatccaatttctttaatatagcrtccacaccagagagtgttgattgtctcttttgtctctagttagtcagtgacaggctattatgtactttttccttcagtggacgtgtgtccaacctattatggctgttttctttatttttgaccatagactctttagagactaaaggctggattagagtttacatagtgccctgtccttccttccaatatcgtccctgataggtggttaacctacttctgcaggtaattatatcatgatgcacttcattctcttattggatacttattcattgcaacatttagtctcataatgagctgaactctgtctcaatgtggttcccacccacaggccattaattatgccctctggggcaatatattcatattcccaatgctaatcaggagtctagaattattgccacccatttttttcctgtaaaatgatttatttatatacaatcttaatagtgtgaagataagattaactgactttaacacaaacaagttttcaacaggacccagtgttgcaaacttttgatgtgttctgacatgatctgagatccaggtcttattctcttaaacagtaattcatatgtatatgtatatattaatgcatatatgtaaaagtaggaaatttttggaaataaaaataagaaagcataagtcgctgtaatcatgccacctagaaataactacttgaggttgctgtgttgcacaactttacagggctctaattatagtgacctctattaatgtatttgtgtatatcgatccaaatatatatccccaaatggaattatcctgtacattattttgaaacctcctctttaaacttagaattataatcacagacatcttttatgtctttaaacatttctcaataacattattttwatttacatttcccctaacttttaattttgaaaatgttgaattttacagaattgaaagaatgatatgatgaacacgcagaaacccttcaccttaattatacaattattactattttgccacatgtgcttccttactgtctgtctctttttctatacaaacacrtgccctcatatgtacaaacacacacgtggggtctttttttttttttttttcaaatttcagtargtttttggggaataggtagtgtttggttacatgagtaagttctttagtggtgatttctgagatttggtgcacccatcacctgagcagtatacactgttcccaatttgtagtcttttttccctcactctccctgccaccctttcccccaagtccccaaaatccattgtatcattcttatgcctttgcatcctcatagcttagctcccacttatgggtgaggacatatgatgtttggttttccattcctgagttacttcacttagaataatggtctccaattccatccaggttgctgcaaatgccattatttcgttcattcttatggctgagtagtattccatagtgtatatatgggtgtgtgtgtgtgtgtgtgtgtatgcaacattttctttatttgctcgttgattgatgggcattttggctgcttccatattttttgcgattgagaattgtgctgctataaacatgcatgtgcaagtatcttttttgtataatgacttctcttcctctgggtagatacccaggagtgggattgctgggtcaaatggtagatctacttttagttcttcagggaatcttcacactgttttccataatggttgtactagattacattcccaccaacagtgtaaacatatttcctttttaccacatctacatcaacatttattattttttgattatggcctttcttgcagcagggaggtggtatcacattgtggttttgatttgcatttccctgataattagtgatgttgagcattttttcatatatttgttggccatttgtatatcctcttttgagaattgtctattcatgtccttaggccactttttgatgggatccgtttgttttttttcttgctgatttgtttgagttccttgtagattctggatattagtcttttgtcggatgtatagattgtgaagatttttctcctacactgtgggttgtctattggctgattatttcttttgctgtgcagaagctttttagtttaatgaagtaccatttatttatgtttgtttttgttgcatttgctcttgggttcttggtcatgaaatctttgcgtaagccagtgtctagaagggtttttctgatgttatcttctataatttttatagtttcagttcttagatttaagtctttgattcatcttgagttgatttttgtataaggtgagagatgagaatccagtttcattcttccacatgtggcttgccaattatcccagcaccatttgttaaattgggtatcctttcccccattgatgattttgtttgatttgtcgaagatcaggtgactgtaaatatttagctttacttctggcttctctattctgttgcattggtctacatgcctgtttttataccagtattatgctgttttggtgcctagggccttatagtatagtttgaagtcgggtaatgtaatgcttctagatttgttctttttgcttagtcttgctttggctatgtgggctctttttggttccacatgaattttagtattgttttttctagttctgtgaaaaatgatgttggtattttgatgggaattgcattgaatttgtagattgcttttggcagtatagtcatttttacaatattgattctacccatycatgagcatgtgtttccatttgtttgtgtcatctatgatttctttcagcagtgttttatagtcttccttgtagaggtctttcacctccttggttaagtatattcctaagtatcttttttatggctatgataaaaaggtttgagttcttcatttgattctcagcttgattgctgttggtgtatagcagggctactgatttgtgtatattaattttgtatcctgaaactgatgaattcatttaccgtttctaggagctttttggaagagtctttagggttttctaggtgtgtgatcatgtcatcagcaaacagcaacagtttgacttcctctttactgatttggatgccctttatttctttctcttgtctgattgctctggctaggacttccagtactatgttgaatagaagtggtgaaaatgggcatccttgtcttgttccagttctcagggggaatgctttcaacttttccctattcaatataatgttggctgtgggtttgtcatagatggcttttattaacttaaggtgtgctctttctatgctgattttgctgagggttttaatcataaagggatgctggattttgtcaaatactttttctgcatctattgagatgatcatgtgatttttgtttttaattctctttatgtggtgtatcacatttattgacttgtgtatgttaaaccatccctgcatccctggtatgaaactcgcttgattatgttggagaatctttttgatatgttgttggatttggttagctggtattttgttgaggagttttacatctatattcataaaggatattgttctgtagtttttttttttttgttatgtccatccctggttttggtattagggtgatactggcttcatagaatgatttagggaggattctctctttgtctatcttgtggaatagtgtcaaaaggattggtaccaattctttgaatgtctgatagaattcatttgtgaattcttgtgatcctggacttttttgttgttggcaacttttaaattaccatttcaatctcactgtttgttattggtctgttcagagtttctgtttgttcccggtttaatctaggagggttgtatatttccaggaatttattcatctcctttaggttttccagtttatggatgtaaaggtgttcatagtggccttgaatgatcttttgtatttctgtggtattggttgtaatatctcctgtttcatttctaattgagcttatttggatcttctctcttcttttcttggttaatctcactaatggtctatcaattttatttaccttttcaaagattcagctttttgtttcatttgtcttttgtgtggtttttttttgtttcaaattcatttagtgtgctctgatcttggttatttcttttcttctgctgggcttgggtttggtttgttcttgtttctctagttccttgagatgtgaccttagattgtctatttgtgctctttcagactttttgatgtaggcatttaatgctatgaagtttcctcttagcaccgcttttgctgtatcccagaggttttgttaggttgtgtcactattattgttcagtttgaagaatttctaaatttccatcttgatttcattgttgacccaatgatcattcaggagcaggttatttaatttccatttatttgcatggttttaagggttccttttggagttgatttccaattttattccactgtggtttaagagagtacttgctataatttcaattttcttaaatttgttgagacttgttttgtggactttcatatggtctgtcttggagaatattccatgtgctgatgaatagaatgtgtattctgcatttgttgggtagaatgttctgtaaatatctgttaagtccatctgttttagggtatagtttaagttcatcgtttccttgttgactttctgtcttgatgacccgtctagtgctgttagtagagtactaaagtctcccactattattgtgttgctgtctatcttgtttcttaggtctagtagtaattgttttataaatttgggagctcaagtgttaggtgcatatatatttaacattgtgataatctccttktggactagtccttttatcattatataatttccctytttgtcttttttaactgctgttgctttaaggtttcttttgtctgttatgagaatagctacttctgcttgcttttgttgtccatgtgcatagaatatctttttccaccccattaccttaagtttmtgtgagtctttatgacacacaggtttctgttgtttttgtcaaatgttgtagacatcatgacacttaccccaaatacttcagcacacatcccctaagaacaaggacattctcctgcatacccacattatcatcaccatacctgagaaatgtaacattgataaatggcatatatcccatttttcactttcctcagtagtccccagtacatctcatctcttggaattggttttaatttttggtacagtatccaatcaatgttcgtaaactgaatttggctaattcctttattttcttttaaatttaaaataatttttcattattttgaattttgggaatgtctagtctaaccattttattgaatattctagcatggtttaatttcttctaaagtaatttgggttaaacatttttggcacaaatactgtgtacataattgtttttttattaattagttaattgacacattaattagttaattgacagttttttgatgaggaatggaacttgttaatcctcctcacacagaacttcattttacagacaaatgctaattgctatatagtgagtctaasttttggctgtgtaactgtgtctgcattcgcttcctgacagtgactggcagagaaagctgaggccagtcacttcttcttggacttgttacaatggcccatgacctgcaagactgatgtgataaaatgatcaccatcatttgtatcatcatgagtgggactgacacatctttagawgacatcagtttctgtagatctggcaatagtctggagagctttttattttaacctaaaacatgcattcatttatttagtcactccacaaacatttttgagtccttataatttgtgaggtagcaccaaccttgacttcaaatggctttttataattcaataaaatatatgtattctaatacaatttttaagttgatggtagcaaggataacttaaaatagtttattaaacatcactataagtggtatatttgcctacaagtggtatatttacctacaagtggtatctttgccagaggggcacagactggagatctaatcagcctggagttgtcagagggaaaaatcatgcagagatgatattttatctcagtgagaaagttcacgtctgcagcctttaataaagttgcccttacatttctatgcactttcacaacatcattgggaagcataggacattgatgatgtgtgtgaaaatwtgacaagccagccatgggtcttgtggggaaataacaattttctcccagatatgctttattctttattatctccatattcagatgtcttgcattctttttttttttttttttttgagatggagttttgctcttgttgcccaggctggagtgcagtggtgtgatctcagctcaccgcaacctccgcctcccagattcaagcaattctcctgcctcagcctcccaagtagctgggattacaggcatgcaccactacgcctggctaattttgtatttttagtagagatggggtttctccatgttgaggttggtcttgaactcctgacctcaggtgatcygcccgcctcggcctcccaaagtgctgggattacaggcgtgagccaccgcgcctggcatgtcttgcattctttaagatgtaaaaaggtctagccccttgactcaaatgtttaaaacattatgattacagtctatttatgattacagtctattttctgtttgttctttgaaattcactctttccttatagcttgtatgagaggcccaaagacaaattgttttgaagtgtacaagtgacagggtgcagtggctcacacctgcaatctcagcacttcaggaggctgaggtaggaggatcgcttgaggtcaggagttttagaccagagtgggccacgcagtgagacccctgtctctaccaaaaatttaaaaagtagccgggcatggtggcacgtgcctgtagttccagctccttgggggactgaggtgggaggatcacatggacccaggagattgaggcttcagtgagctctgattgtgctactgcactcctgcctgagtgacagactgggacctagtctctaaaaaaagaaaagaaaagaaaaaaaattgtacacatgcttttccgcaatcaggaagaaggttgtttatgggtaaaatacctaattcagatctcattagtttagaaatatgggaagcaaaagaagtacataattagaggccttctttaaaccagcttagctgttctttattccaaaatgtgggggttgtggagccagaacacattactgccttagtatgtttatggggtgtagggtaggatgaatcagaccggggctgtgtatgtcttctgtgggctctaggcacttttgcctttgtgggtcccttcctccataaaaacacatgaaaaattatgtttgatgaatatgtcagtataaagacaaatataatccaggttagattcattattatgtatccattactattatattcatttttcctctgattttgaaataaatgaaaattgaaacagttttgtgggctcttgaaaatatcatgggccctaggcactctgcctactatgcctcatggataagtcagccctgaatcagatatgcatactggggtgaaatagccttccagagagcaactctgtatatcttggggaggagagagggagacagcttcttatgcttatttttgtgaatctacatatagaaagtagttaaatatgcttttagtgggagtagtcctttcaagttattattgccactataagttaaaaaccatgtggtagactgggcttggtggctcatgcctgttatcctagtgctttgggaggctgaggtgggaggatcacttgaggccaggagtttgagaccagcctgggccacatagcaataccttgtctctgcaaaaaattaaaaattagctgggcatggtggcatggttctgtactactcaggagactgagctcggaggatagcttgagcccagraggtcaaggttgcagtgagctatgattgtgccattgtactccagcctgtgtgacagagtgagaccctatctaaaaaaaaaaaaaaaaaaaaaaaaaaaaaaaatcacctgacaatacagaactgtatggtactcatgtattttcatgacacaaccaaaatctttaattttttcttggcagcttacacatactatttcaatttagatggctgtgacataacagatcaatagcataagaatttactgggtttgcccagagtgatggtttacaaggctctgttaatattctgtaattgtcctttgtgaacacaattgttgcatgacagaaacaacatgagtcagaagtgataggaatgaacctggttctacttaccaggcatttgtattcaaatcctctgagcctcaattttcgcatttgtaaaatgggactaatgtttacctctgaaggttactgtgagcatgaacgtaaaatgaaatatatgtgaagtaactcataaattataaaagcagtatgtaaatgttagtactgaattcatagatatatgatacagttcattgatttctaggtttttctcctgaaaactcctaatttctaagttttacaaaaatagtgttgtccagttttatggctgacatgagcattatatacacaggtgggtttcctatttactgaggtgacttgtatagggatctgatttccaagaggacatcctggaagcctcttctgtaccctctgggactctttcaaaagggttgtttacttatggtgactctctagaggcctgccagtgtggtgcaaatgacagtggtcagttgctttggttgaagtttatatacctgcttctcaggcatttacaacgacttctcttacaataaatgtttcattatcacatctgtttaacaaactaacaggccgtaataggacctaggggtcatggaggttcaatgccaacagcattttggaaagtattgtttttgttctgcagttggggaataaagtctgtattttttttttgtataattagattacataacaccataaacattgctttgagcatatattatttaacaggtaatgtgcttgtcctttgatagagggtgataaaaaagatgaataagatatggaacctatccttataggtaccttatcaaggcatataaaagtatttttatttgtattaatttatatgtttaaagagtgttatttcttattgggtttatctcttatggaatgataaatccaaaagctgttttctcaagtagattttcagttgatcttttgaaggaattagtttttgtttgaatttgcatttcatctaccataataatttattttaaattggatcatgttttaaaaagtcatctattttcttagtttgattgaatgaggctgttgaaatgaagtaccacgtggtgctggccagcgagtgacatacataagacagtgctggcttcacaaaagccctctcataactttggggttctgtttcctcatgagttctcttctatgttttaataactttttggtgtccagagaggaaaggcatgggaaatcatctttggttccactagagatgagagagaaagacttaatatcttccatttcactatactaaaattctgtgcaaaaagatgcttgaaattatygtagagactgaatctttgctgcttgttataaatattgcagggcataaaccttccattcataggttcatcagcttttatgattgggagtgacagggaggcagcattgcagtccttagtcctaggtgyggtctagaatttaccctgtatttaagtcactttggaatagaagttttttttctcggacaggatacactatatatttttaaatctcctcccatagtcgtagtgcagagatataaatagaagtacaggtaagagatgtcttctgcctttcaaacccttcctaagtttgtgtgctgctttaactttattcacatagagcagtctgttttattactcaggatatgggctaggttaggatgctgtcacaaaccaccagtcacagaggacttcctaaagagaagccccagggagtgttcctctccaccacccttccctcacctctctgtggaattaggggagagcggctattctctccacaaaaactctttttttcttggatttcatgaccctcatgcagattcttcttgcttctcaggctgctctgcctccgtctccttcattgcaccccagtggtggamtttccccctggctcagtcttctgcacttttctgtctgttcactttgttcctcagagaactcctcctctattttggtttctgttcatctctatggagataacttttaaaactatggtgtttattgtgaaatctttcctaaacattatacgttatttccaactgttgctgatttcgatctaatagttttatcaatatcgctttagattgcacagaataagaaaacctgggaattagaagaatcttcgaagtcagtttttccagctttatttctactttgaaaatctgttactatagcgctgatgaatattttccttgaatattgctctgacaagtagctcagatatctaatttgggagatgtctaattctctttcttttctttttttttttagaaacagggtctcactstgtcacccaggctggagtgcagtggtgatcatagctcactacagcctcaaactcttgggctcaaatgatcctcccacttcagcctcccaagtagccacatctacaactgtgccaccacacctggctagttttttaattttttgtaaagatagggtctcactatactgttcmggtttgtcttgaaggcctggcctgaagtaatctttcaccctgggcctcctaaagtgttaacaattacaggtgtgagccactgcrttcaacctcattatctgttttgacagtaaattcaaccgtatgttaacagaatttcagatccttgtaaagtttactttctgttctgaattttggaataacagagtatttattctgccatctaccttaaaaacaatcaaatatttgaagatctctctcattttgccacatgctctctttcttttgctaatattctctctctctttcagtctctgattttttgggtggacacctgcaaatttcctctaatatatgacatggttcatagtttttagactctcagtatcttacctataatatgagcttcaccagggaagggctgctatctttctcatttttgaccctgcaacatgtagtatggtgtgtgtcactttgttctagaacctggacatctactgagtagatgtttgaatgaatacatcatggtcacaaaacgttttgatgctcttggcttctccagtggcttctatattgcttacaactgggttcggttgaacccagttttcaagatgtagtctgacttaacttggaatggagtggtaccagattctgctgatctggaatttggcttccattaagattgtattagcagcttttgggaatttgtacttatggctcactgagctcgcagtgaaggcagaaaaaccatgaaagggtcttgagtcaggtgttatgtttctgtatttattaagttgatgtagagtcattgaattagtcaggattctctagtaaaacggaatgtatatgtgtgtgtgtatatatatatatatagtagtatatatatacacacacacatatatacaaatatatatggatatataatatacaatatataataatataaaaatatatatacacgtatatgtgtatatacgtatatatgtgtatatttgtatatatgtgtatatacacctatatttgtatataggtgtatatatacatgtatgtatgtgtccaaatatatacgtatatggatatatgtatgcatttatatatattcatttatattatgtataaatgctatatggatttgcctcatatgattattgatgctgaaaagtcctgatttgcagttggcaaactggagacccaggagacccagtggcatgatttcagtccaaatgccagcaggcttgagacccaggaagagccaatgttttagtttgagtctgaaggcaagaaaaaactgatgtcccagctcaaaggcaagaggagttccttctactcagcctttttgttctattcaggccttgagctgattggatgaatcccacacacatcagggacggtgatctgctttacgctgcctactgattaaaatgttgatctcatgcagaaagaccctcacagacacaccagaactgtgcttgaccaaatatctgagcaccctgtagcccagtcaagttgacacacaaaattcaccctcacagacatactttagtttatcaagatatttttgaatttgtgtatttctccttttggtttgtcaggtttttctttacatattttgaggctacgttattggatgcatacaaatttagagttgttgtatagtcctggaagatcaatcttttgttactatgggatgactctatctctagcagtgcttattgtattaaagtttaatttatctgatatgagtatgataatatcagatttcctatggttaatgttgcatgttatatattttcacatttttttactttaaactctttaatatttttttatttaagatgctgcatatagagttttaaaaaattcagtttgataaactttggcttttaagtagaatatttagtctacttacttatatctaatatagttattgctatatttgtatcagtagtaaaataaatgcattatcttaatatttgttgttattcattgattttctttttattgccttcttttgcattaatcaaatatttttattattctagttccaaccacctgttagcttggtagtcatcattcctttaaacttctttttgtgattactctggttacaacatttctgtatagttgaatgagtacttttactactttatcaacaatatcatgaatttagaatattttaactcttttaatcaaatttttatgctatcattaccatgtatttaattcttggtacattttaaaaccagcagtgcaacagtaataaataacatgtattattgtcagtacagtaattatttgtgcagatttacccataatcattctgttattttttatttttctgcattctatctagaatagtttttcttctttcttaagacttccttttttttttaaatgtgggaatgctggtaatgaattctatcactttttgtcagttagaaaaagtatttattttggatttacatttgaatgtgaatatttccactgggtggagaattctatattgatactcttttcttctggcactttaaagatatctttccattgcattcaggcctccactgacttttttgaaaagtaaggtgacaatcttattattacttttttgaagatgacatatctttttcctgtggctgcttcaaaaactttgtctttgagcaatattactattatgtgtctagatatagtttctttttttatccagcttgggattcttagaaattcttcattttgtagtttgatgtcttttgaaagttttggaaaattcccagtcagaatatcctcagatcatgtttctatcccctattctctctgttctcctcaatggggatccagttacacatatgataaacctttaaccatatatcttatctttttatgctcttttctgaaattttaaacttttcatctttccatatgcagttttcatattttctactgaccagtttccagcttactattaccctatgttgctgtttctaattttctgttcatatgttgaattctgaatttactatattttcaaattctagagttttcatttgtttcttttacatatatttccgttctttagtgaaattttccatcttgttatctttttaatgtacatgttaatcagttaaagtccaaatctaatagttctaatatctggatcatctgtttttattttgtatttatttctttttgttttcaataatttgatattatcttctgccataaccactaatttgttattgaacgctagatattgtaaatgaaaaattgtagaggatctggataatgtcttccttcaggaggatttactttacatctgggtagcagttagagaaggagcagattgtcttgatccaatcagggaccgagatacttttgaggctgaatttcagtctttataaggtttagtatgttttcattggtttgtctcatcaaatataatcctttagaagtcaaatgaaaacttagtgtgtaccaagacctctcttccctgctaggctctgaactctaattattgtcttttctcacttctgggcagcttaggaattagcaagtgtttcaaggggaaaggtacaraatatcaggtttactttaatacatttctcttttcttccggatcttggctatttaaattctggctgttttgtcattccatgagatcttcaagtagctatgtatatttcctctagcatttatcgttattcttagcaggtgggttggtcctgacacaagttactgcattatataggaagctgaagtcacaagttaatttttaaataatctgttttataagtttataagaatacattaaatattagtattttatagttattaggtgattatttgaatacatcaggaagatgtatgagtaagaaatgaaaaaaatgttaagttgaataagaaaatggtcaatcaatatattaattagtcttctctgctggaatgagctaaactttagtcaggacacataaacaaatgtaaatctatttggaaatgcttcaaactacagtgaaaaataaaatgattaaatacttaaaataacattctatgttggatacattcattgggcttagaacatatttccaaatgcatttttctaactctacgtttcttcattatttatgatttccaagtatacaatctaattgccatattgtggttttataaaaaaaagtttaagtaaaaattttcatccatagaattatactttattgtaaaatgcttttaagtcccttccatacaaccattactacagaacacccctttgatccagtatttgagccagaatctgacatatggggtaagcagttaatgaatgttatctgtcactgtattaggctgagtattgtcagtcaatgctacttgagttagagtaccccaggggacctagttctcatctaatgttgctctcacaatttgtccaaacagaacttcccaatataaaaataattataatttttaaatttctggacttaattttgaaatctggactctcttttgatggcagaatgaaatcttaaagcatgtgaggtaatctcaaatgtgctattttcttttttttaaaagcacctaaaagagagctaaccaaatatgatattttctataaataaaagtactcttaataactcagaaattaaaagcctactgtgaattgtaaatttactttttacatggtgaaaaagctaatttaaacatcacatttcaggccaagtgaggtggctcatacctgtaatccycgtactttggaaggccaaggctagagaatcttttgagcccaagagtttgagaccagccctggtaacacagggaaatcccatctctaaaaaaaaaaaatcacatttcaataattttggctagtatgatcttgtttcactgtagtagtgctgattgtcttatgaaaaataaaaaatattgactagtcattcattcattcacttttttaaaaacgaaacagaaatgtattcctcacagttctagagatggtgaaatccaatcaagtggtcagcagattcagtatctggtggggcttgcttccttgttcatagacagccatgtttttactgtgtcctcacatggcagaaggkatgagggagctttctgtggtccctttgacaggggtggcactaatttcatttgtgaggcctctgccttcatgacctaatcacctcccaaggtcccacctctgaattgcatcacatagggaattagatttttattattttattttatttaagttctgggatacatgtgcaggatgtgcaggtttgttacataggtaaatgtggtggtttgctgcatctatcaacctgtcacctaggaattaagcccagcatgcattaactatttttcccgatgctctccctcccgttgttcccctaccccacaggccccagtgtgtgttcttcccctccctgtgtccatgtgttctcactgttcagctcccacttrtaagtgagaacatgcgatgtttggttctttgttcctgttttagtgtgctgaggataatggcttccagctccatccgtgtccctgcacaggacatgatctcattcctttttatggctgcatagtattccatgatgtatatgtaccacattttctttatccagtctatcattgatgggcatttgggttgattctatgtctttgtcattgtgaatagtgctgcaatgaacatacgtgtgcatgtatctttgtaatagaatgatttatattccttcgggtatatacctagtaatgggattgctggggcaaatggtatttctgcccgtaggtctttgaggaatcgccatactgacttccacaatggttggagtaatttatattcccaccaacagtgtaaaaacattcctgtttctcragatcgcgccattgcactccagcctgggagacagagtgagactctgtctcaaaaaaaagaaagaaagaaaaaaaaaagttcctgtttctccacagcctcactagcatctgtggtttcttgactttttaataattgccattctgactcgtgtgagatagtatctcactgtggtttttgtttgcatttctctaataatcagtgatgttgagccttttttcatgtttgttgcccacataaatgtcttcttttgagaagttcatgtcctttgcccacttttcaatgtggttgtttgcttttttcttgtaaatttgtttaagttccttatagattctgggtgttagatctttgtcaggtggatagattgcaaaaattttttcccattctgtaggctgtctgttcactctgatgatagtttattttgctgtgcagaagctctttagtttaattagatcccatttgwcaacttttacttttgttgcaattgcttttgatatttttgtcatgaaatctttgcccatgcctatgtcttgaatggtactgcctagattttcttttagggtttttatagttttgggttttacatttgagtctttaatccatcttgagttaattttcatataaggcataaggaaggggtccagtttcaatcttctgcatatggctagccagttctcctagcaccctttattaaataggaaatcctttccccattgcttgtttttgtcaggtaaccaaaacagcatggtactggtacaaaaacagacacatagaccaatggaacagaatagagaactcagaaataagactgcacatctacaaccatctgatctttgagaaaccattcattcacttattgatttatctatccattcatctatctagccatccatccatctatccatcattctgtccatttcagaaatatatactgaacgttgattatgtgctagacactgttccaaaggttgcaggtacagctgtgaacaaaacaggtttaaagaagtaaaaagccctcaacctgcatggagctcacattctggtcgggggcggggcagaaagacaatcaacaaaataaatgaataaataatcttctacattgggtgggagtgtgctgcagtttcaaaaaggataaccatggaaggctgaattaagaagacatatttgattgcagatttgaaagaagtgaggyggcagccatgtaaatacttgagcaataagcatgccaggcgagggaacagtaagtgcaaaggccatgagatgagaatggacctggtgtggtcaaggaacaagaggccactgaggctggagttgaatgaagatgggggacagtggttgtcagggctggatcgagggtttttttgtttgtttgttttttgtttttttttttagagggagtctcgctctgtcacccaagctggagtgcagagacgcctcccgggttcaagcaattcttcccaagtagctgggactacagacgcctgccaccacgcccagctaattgtatttttagtagagatgtggtttcaccatgttggtcaggctggtctygagcttctgctcaggtgatccacccgccttggcgtcctaaagtgctgggattacaggtgtgagccaccgtgcccaacctggatctaggttttttgaggtcttaagctaatataaatacaaaatacaaaatcaggtataataaaaatattaatttagagtgagaaaatctctataaattataattttgaaaatttgaaaaataccccaagcatcccaaaattcagaaaaacaacacagtgtcttcattttgctgaatgtgcctttataaaatgttttatttatttatttttggccttttatttttgattgcctctcatataacaattattttgttacaaaattttctaaagagagacttagataattcagtttttcctttggtatagttaattaacattaacttaagaattatggtagcttagaaaaaattttcacctttgtgacttcacaatgtcacataaacatttagaatggtcaaccttggaaaaacttccaccaagtttctttcatatatgaactgttacagatatacttgccataagtagtgctgctataagtaggtttatgctcaaaagcacaggaattctaatgcattttattctgtgaaatccccatgaaaaaagaaaaatatgtttattatacttactaagtataataagcatatcatgtcatacatgtattcatcaactcctagtcaaaacagaatttatcacctctcaagaatatgaggagtgtatatatattatgtatcaaatatatatgatatgtaatatataataaatatatgatatgtataatatatatctatatattattttattatatataatatatatagatctatatctattatatataaatatagatctatatctattatatataatagatatagatctatatattattctattatatataatacatatagatctatatattattctattatatataataaatatagatctatatattattttattatatataatatacagagatctatttattatatataatagagatctatatattatatataataaatatagatctatatattatatataataaatataatctatatttattatatataatatagatctctatattattttattatatataataaatatagatctctatattattttattatatataataatatagatctctatattattttattatatataataaatatagatctctatattattttattatatataataaatatagatctctatattattttattatatataataatatagatctctattattttattatatataataaatatagatctctatattattttattatatataataatatagatctctattattttattatatataataaatatagatctctatattattttattatatataataaatatagatctctattattttattatatataataaatatagatctctatattattttattatatataataaatatagatctattttattatatataatatagatctatatttattttattatatataataagtatagttctatatttattatatataatatatatagatctatatattatattatatataataaatatagatctatatatattatatataataaatatatatgatatatttgatatatcatatataaatatatatgatatatatcatatataaatatatatgatatatatcatatataaatatatatgatatatatcatatataaatatataaatatatatgatacgtttattatatataataaaataatctatatcatatatattatatataataaaatgaaatacgtaataaaatgttttacatatagatacatacatatgcatatacatatacatttacttgatactccttgtactcctgatgggagatatattgttttgactaggagttgttgaatactaaatcttacacatataattttacacgtttgatgattgggagaattctgcacaggcttacttgtagctctatatttcaaacctccagtctcttccacaatccatacacttctagtgccaggtgccgtaggatgtgatcatgttgccatgtgatcttgggccctagattcttatgttacggcactgcgtggatctgcattcctgaccaccaataactgaactctatgtagaagtatctgtgaatcacataaatagactccaggaaacacaaactcatgtagttgcacctgattgccccttatctggttccgagcagcaccatctgatattaggcaaagtgtgatggaaggaacgttaaagtggaggagatgatggtctcagccccctgtggctaaaatatttgacttttataaactgaaaaaaaaggactatgcaaacacatttctagtgctactccttgggatgaactgtgcaagtgaggtgagctgaagcttgtttagcttcatggtaacttggcctctggtggtgatgtgaggccagggaggtaatggggtagatgtgtaaagattaggcagggccctgaaggccttggtaacaactggcttctgtgtcttcagatgaagagctagtggatggccttgagtaggagagagagataagacttgcggtaggcaaaataataccccttgccccaatgacgtcccagaacctgtgaatacattaccttacaaggcaaaaggaactttgtggatgtgcttaagtgaagggatcttgagggtggtgagaatatcctgaatgatggaggtaggcccagtgtaatttgcagggatccttatcagagggaggcaggagggtcaagggcagagaatgagatgtgacaacgaaagcagaggttggactgctgtgggccatgagccaagggacgtgggcagcttttagaagctggaaagtcaagaaacacattcttccctaggatctctagaaggaactcagccctgctgacaccttaattttagccctgtaagacctttttcagactgctgactttcagaactgtaagataatgtttatgttgtcttatgccactaaattcatggtaatttgttagagcagcagtggaaaactgatagaattctgaaagaagcattctggctgctcgttgagaatagatggtagggcgaaggggcagaagcattgagaccagaggggaggctgttgcagtagcctgggcctcgaggatggtggcttggaccagggtgtgtgcagaggaggcctgagaagtggccgattctgagcatytaccacctttcttttctgcctcaaatcctggcccccttgtatctctttttaaagccttattacctgaatgtgtcatgaataggtaaataaagtgaggctcctatttttttgttggtcttttcacacttggactgatattagaaggaasagctgagatgagactgtggtgatgtcctcttttagtgtccatgttttttaccccgtcttagatggcagaccgcctccaccaaattccttttcgttacatcacggtggtgtagtctgggtcaggtgcctggcaaaataaccctgcacactccatggtttgtatatggctacgtaagctcccttcagagctgcctgggacaggcagggatgctttttggccacccgtctggatgtgatgttccttttctccagttgctgtggctctctggcctgtcttctgcatccttgctgtgcacatatctgtgggcatgaaaacactttgaaggcaatcattgtcttgtttgtctttgttttgtctttgctgactagctattctagctagatgagcagctctattagccttgctcaaacgagctcaataaatatttttgggataaatcactttcccttggctctagtaaattaattgccatatggattcagggagctgagatgcagaaaccaatacgtattaaagaaactcagtttatagcttcatgcatcttaaagtgacaaacacgaattgaaagcttcctgtgcaacccctgaggtatcaagcagagaagtgctctcttcagagctctttcttgcctgtctttcttttatgcctggagttatttcctctcattttatgacaggaggctttcttggccaacccttaggtggccagcctgtgtttcacagaggaaaattaaatgccctctggcttctaggctcttataatctttggggcagatgctgattttttttttctttgagtagagatgatacagaaagaaagaaatgactatttctcatctttagagaaagcattctgtatggtccagtccataaaaatgcatttttttttgctatagataatctaattgtaaaagaatgtagatagaaaagaacagattagaacaggcacatataagaaaagtttcaaagaaaacagtcagttttgaacaggagtattcttagtgaactgcccaaagtctccaaggagagaggaaacacgcactacaggaaggccttcccagtgcagcagagaccaaccctggagatgatgaagcatgggaagtgactgggccacgaggttgtttgggatggggtgtgtgatttgatgtacatctggrgtattgcatttgatgagagggctcttccccctctctttgacctttggaccaaggcacacaccaatttgcagtttcccagtcatctatgcactgtaccaccaccatctccttatatctagaatctcctccgagyttcttttataagggaggcagttctgtgtttgcattctgactttaccgcataatcttgctaggactctgtttcttcccctgtaaagtagggctgataacagcatgtacctaatgggattgttctgaggattaataaaataatgtgtgtgaaacacttcatgtagtatctagcttgtaataagtgctcaattaatgttagctattactattatcattatcataataagtcttaaatctctagtcatgaatctttacttatggaaagctacatgctgagggtttatatggatattttattaattttatgtgtaatttgtataatccagttcatgtatcctagaagaggaatgaataatgaattggtaaaaattttacatttctttgtgaagctatagtgagccctggaaggaataaagttctcaaatcaaattttccaactatctggatctgatgagcaaattggctcagccaagagaaaaacaaacccaaggccctttagtatttgtttgactcccctaactttgtttccaagctctcttgtgaggaaagcgtaaaaaaattgtgggaaggtttttttttccttctattctctttggttttctgcttaaatgtcaataagttctagaagctgcaggtcaccactgggtttcaataggaaaccccaactggggacacatttttcaattgtatcagaatgtgttcttggagtcaactcaggaaatcttggaggctgagggactccttttctttaaagctctccccactcattgttcttkcctcatgtctttaatgaattgctttggcttccaactacatggaccagattatgaagaatgaaagaaaattaggaaaggaagaagcttaagttattgatttagcttgaggaaatttttcagagatttctgacccaaccccaaaaaacccacaatcaccctaaaccccaaatgacacttcatgtttggagacattcttcagcttttggatcagtaccagtcttgctcaggaaatatcagtctttatcactgagttctatatagggaccccgaatgctccatggtgcttcatcatttcatgattttgagggtctacagccaagtgcctgaggctgttttctaaaccacatttggtgaaggacaaaatgctctggagttaattaaagaaagactgttgtatttgttaattagggattcatacttgctgtgatcgctcgtgggtctagtggaaacttgctaactcttccctttactcttgctcttattagcagacctcatgcgttcactacctaatcttaaatactaaggtgttacaaattgttcacaaactgatttttaggaagaggttgtaaatggcctgttttcttttgcctactggaagtggaagttggataatgtataatttattatattatgatkgagaagaggccagattaggagttgggtgttgcctttgaggacctggagtagaatcaatgggcatttgccaatttccattgaaaatattaaaaaaattacttcaagatcttcttgggaaataatcatattagcaactttaagactgactattcaagcttgagtgatttccttttttgcccatttactatttttcagttttttaaaaaaggatttttctggtatttttctgtttacaatgtattttccatatatttcctcattaaatgattataacacacagtggcattattttactgagaaaccataagtaaggagaggtatgagttaaaatgtgcttgtataggtacttgcagaaggatcattggctcttgttgtctcaaggtccaagcgtctttttcttttatgaggactctttttttttttttttcttgagacgtagtctcgctctgtcccccaggctggagtgcagtggcgtgatctcggctcactgcaagctccgcctcccgggttctcgccattctcctgcctcagcctccatagtagctgggactagaggtgcccgccaccacgcctggctaattttttgtatttttcgtagagatggggtttcaccatgttagccaggatggtctcgatctcctgacatcatgatcygcctgcctcggcctcccaaagtgctgggattacaggcgtgagccactgcgcccggcccatgaggactctttcattaaactctcatttttatgggtcctaaaaatcttcctaacaggggaacaacaccttaattgaacttaaaaatttctagcagggggccagacatggtggttcatgcctgtaattccagcactttaggaggccaaggtgggaggattgtttgaggccaggagttcgggaccagcctragcaacatagtgagaccctgtctctacttattaaaaaaaaaaattctagcaagatagtattatgtccctctcatcttttaaacttgtttcttagtgatctgattacacttttggatgttctgtctgtatctttcctttccaaatggaaagacaagcataagtggatatagttttgtttttaatcataaaccaggagcgactttaacaaaccatcagccctatgagataattctttttttgcagggaagtagggagctatagattaattattctgaaactgggttattctttttgataaatgttcccyaatatttaactgatttataaatgtttacttcctaaaataaatgaggtattctcatttaattatcttggagaatataactggaagtacatggctcaaagacaagcatccaatgagtgcttaattgctatcctatttggttgaggaaggcatcaaattatattggattttatgattttgggggatttaaggttattatcgtcatcctatatggagtagcactttgaaggcttacttatctatttttctatattctggagcagattcaaaacaaatgtctaagagatttctgcctctgctgatggctgttatcttggatcactagaatgacaaaggatggcttccttcctatccaggcacatgtttctgttaggctcctcaggtgtcaaaaaatgatgcaaatgctattaccaacttgatcttctttcgggtcttgtactcagccagcaatacggtgtagcagcattccaggtatgttccaggaagttcaatctcaagttcatggtcacatagtatttattacagtgaagttgatagaaataagaatgattagtcaacgaacacatagcttatgcattcattcaaatatcccaaaatatattcctggatttaatcagatcaacagagaatgagtacagagaccccatcatagacccctctgaattgtgtcctgagataatatccttagggttgttacaaaaaccttattttatgttctttatatcaaacaatgacttccttatgaggatttctaaggtaaattaatgcctgaggcaagaattactagtaattgtacttttcctgagaaattgatttattattacctaccagaactactaataattgtacttttactgataaattgactttattacctcacagactttgtaaaataaatggcaatagacaagcattcctttattctgtggcatttgtggcacacctggatcaggtgtgtgggtcattggattagctatttttattatcattcttgactctggttgattatcattcttccttctgtgtcttcttccaccctactgtactttaaacatttaaacaagtatttttcctgttgtacattcttttttgtaaaattttttattttaatttttgtgagtacatagtaggtatatctatttatgggttatacattagatattttggtacagacatggagtatataataatcatgtcatgtaaaatggggtatccatcccctcaaacattttcctttgtattagaaacaatccaattatacttttagttatttttaagtgtacaattaagttattattgactatagtcacctggtttgctgtcaaatagtaggtcttactgttgtacattcttgagtagctgttttgtagatggtcgttgtctgtaaacacttttgcagagatgtctttatttccccttcacacttgattatttggctcggtatagaattctaagtttcaaaatatttttctttaaaactgaaaataatcactccaatgtcttctagcatccttattgctgatgagaaatgtcatattggtctgattcttatgtttcaggctaaccatttttttttcttttggaagtttttgggattatctgcttgtccttggagctcaaaattttatgaaggtttgtgggttcattttcattcatcctgattggtacttggtggccctttcactttgaagagttacatcttactctggagcagggcagttttcttctatttacttgattgtttttacctatccattgtctatgttcccttatcctaagttttttttttcacattttcctcctgtttgtcattttgatatatattttgtgagatttatccaatctgttctttcgtcttgtccattctactctccagtgtgtccagttaatatttttaatttctagggactttttcttgttctctgttttctttgtttatattagcttgttcttgtttcatggatgccatgtcttcttaaatatctttgaggtgctgggtatggtggctcatgcttgcagtcccagctattcaggaggttgtggtgagaggactgtttgaacccaggagttcgagactgcagtgaactacaattgtgccactgcataccagcctgggtgacagagtggtatgcagtggcacaatctcaaaaaaaaaaagagcatctctaaaaaacctatatatctatgtatatatattcaaggcactaatcagaattaaaaagagaaaccaatcccctttttctacctgtattcagcattatttcttcctgttggatccctcttttttgtgctcttggtttttctcagctgttactggtttgtatttataaataaaggactagatagattagtgccatcgccagggtctttttctctgccaggcctctcctttgaacaggagtgagcagcctgctgacagaggcttttctgtgtgtgttagtcaggcagtctggcaaatcccacaatggccccagtcaggcaggctttactaggggccaagttggctatagctgctgtagaggggcagagctcttccttctcaggcctgaatacccacccttggtttccttccctgacgtgttgtctgctctctttgtgggcaaagaagggggtgtgggagatcccaactggttcagttatttttttaattactctaaggtggtaatataatttatcatcaaatggagacacttttgagaataaaaggggaacctatcaattattttgacaagataataggcataacctgggcctgtcaccctgtccataacatactctcaatcttcatatttactgactctgaatttagagctgctctgggctcattgggaagatcactctctaattcttttggctagagttatttctatcttttttctcccagtcaaaatgatctcatctgctttctattttattctctaggctttcttcaaaatttatgaacctctgctagccactactcttgttttccagcactgttatgttttcaatcttaaaaaatgttttctgtaatttcagagggacctgagaaagaagggaggaaaaagacagactcaacttgctatcttaaaccagaagctcttttagctcttttagtccactttaaacatgctggcttactatattttatacatccttatatattgccttactcctttytggaactggacaaattcagtgataattgtgcaggtgtgagttcacactggtaaatcatcaaccccttggtgactagtttcctttcattcctcttacatatggaaggatcccatgatgcctatgaagtatcaggcattaggtcattgaacctctgagcckttctcaatgggaatagttatgggggatttgttttcagcgtcctttttttccaggatgtgatttattgccaaaaggtctttatatcccctcatacactgtggtagcacagagaagaaagttaattcctgcaaagataattcaggtgtagcatagtcaggttaaagacagaaaactgtagcaatttagaaccaaagccagtattttgcagaacttaatgaagggatgctaaattttctgccagaattaatccaggaagacttagttcagaaagatgataattagtagaagtaacagacacaacgattaagacttattaagaaggatttagaaacaaaagtgggcttcctggctctaatcaggttttgggggatgagagcaatttggatacctgaaagaagatccaaactgacctaccatagaaactacttggctgctttgggaatgggctagtccctatccttgtggagtgtggttacatggagatgctggacaggatggtttcttttttttcttttttcttttttttttgagatggagtcttgctctgtcgccaggctggggtgcagtggtgtaatcttggctcactgcaacctccacctcccaggttcaagtgattttcctgcctcagcctcccaagtagctgggactataggcatgtgccaccacgcccagctaatttttgtatttttagtagagatgaggtttcaccatgttggccaggatggtctcgatcccttgaccttgtgatccgcctgcttcagcctcccaaagtgctgggattacaggcrtgagccaccgcacccagcccaggatggtttctgtgtggctcacagagtcaagattctggtgtttggagtgggtaaaattaggtacagaactatagaattctactcttggatgtgcttcatataaatgtgaaattttagaaggatcatcatctgaatgtatatgaaacaagctaaagccaattaatatataattaatatatctgatttttgttttgctgctataatctattaattacatgcagcataccagtggtccaggttaaccttttgccatgcaggaagagccctcgctcctaccatcccagtaacatttttttgctttcctgtcagcaattttactacttctgggttatggtgatgttatataaataagtttctagctttttaagcatttaggttcccacacctttcaaagtaccactttgggatttgatgttttaattctttgttggggcatcagcaagaaagacaggatggtgctttttagccagggtttgaggtgtttccttcaggtgggtgggtggttgagaggttgcttcctggtggattctggatttcaaagttataggttaggagcaaacccatttaggtatcatcaactgttgacaccagtccaatattgttcttatcagcagttagttgagccggactagaaaacaggaaccatcacagagacctggctttattagataggcaagagggaaaccatgcaggtggttactggacagacaaaacaccctrcaaatggtagaaacccagtcataaccaaagacagagtgtcatttgtcaggagcagtccttagaggtgaccttcagtcttgggagttgaaccaccagggctacagagagattctgcctgcacttttggaaaaaatttgttcttacaattcatggtgcctggcatgcaagaggtgggtgctgaaatatattccttccttccttctctccctcttcatctccctcattttcctcatctcccttctgcttccagctcttcttttcacttttcttttgctcttccctcctccatccccaacacgtgtctccaagttactttccaccatccagtctcctttatctctggttgtaagtgccttctctaaactcagactcttactgcaatccctccaccttttaccacctgtcacctacccagttggagaattatgggattaagggaatttaatggtgagagggtcaagtcactcgccatgagaatccagcattgacatctggtggttaccttgctgactcttttctcatagctttcatcattccatcctaaatctttggtcaactctggaagtacctcttcagtaaacatggagcaagagcttgctacccttactactaaacttgttctgccggtgtttctggggcactgtcttatcttgccctctgcaaatttttattctgcactgtcataatctttaggtttattgtcctttttatattattatttgtactggtgtttgcatttgctttcagaagagattttattctttggtcacttccagytaagggcagctctcagtctcctgattatgtgtcattcctcttaatatgcctgggctgcttacagatatcacctttggttctaagaccataaggtcagtgacctcactggccasttctgtatggtttatttttggctatgttatattttgtgactttgtagcaacaaaccccacaaagcattccttgccaggatgcatttgactttgtcagctccttctcttaggaaccacttgaagttaagagaaagggtctttgtggtgctgaagatacatagaaattggagacacataatgttttgctttatggttggcatcaggaggacaatgagaaacattgtagctttccattttgggactttacaacacatgttccaacatgtacactggaaaaagccaataccttcaaatttgaaagaaaagaattcttgcagccttaacaacaaagcaacctaagtcttgttgttttaatgagttatttgtttctctgggcctacaatttaatttcatacttgatttctctctctttagaagtggaacrgatagtgaaagccaatgaccgtgaatataatgaaaagttccagtatgcggtaagtgaaacacacataacacatacgtactaggataggtcttacctaaagacagtgggatgcatgtcttctagaactttatgacttcaccaaaaactttcttcattggcccattttgacagcaaggtgacatatatttccataaatacagatcttagtaatgtttacaaacatatttctctcccactaagagtagttggtatgcttattgtcatgggaagatgataaaatctcttctttctcaagaattgatgtttagctcattttggtacccatttggttagtagaatccataggaataatatgaaaatggacctttttggtagcacttagtgatggatgtagtgacgttagctagtggttgatgaatggcatttgagggattttctctaagcaactcaggctgaatgtggaaaaatatatgtaagataaagttccactcccaccattctggaagacagtgtggcaattcctcagggatctagaaccagaaatactatttgacccagcaatcccattactgggtatatacccaaaggattataaataattttactataaagacacatgcacatgtatgtttattgcaacactgttctcaatagcaaggacctggaaccaacctaaatgcccatgatttgggcatagactggataaagaaaatgtggcacatatacaccatggaatgctatgcacctataaaaaagaatgagttcatgtcctttgcaaggatgtggatgaagttggaaaccatcattctcagcaaactaacacaggaacagaaaaccaaacactgcatgttgtcactcttaagtgggagtcgaacaatgagaatacatggactcagggagaggaacatcacacagcagagcctgtcagggcctagggagctaggggagggatagcattaggagaaatacctaatgtagatgacgggctgatgggtgcagcaaaccaccatggcacgtgtatacctatgtaacaaacctgcacattctgcacgtgtcccagaagttaaaaacacacacacacatatatatacacacacacatatatatatgcgtatatgtatagtgtgtgtgtgtgtgtgtgtgtgtgtgtgtgtatatatatatatatatatatatatatakagagagagagagagagagagagagagagagagagagagagaggccgggcacagtgactcatgcctgtagtcccaacactagtttgggaggccaaggtgggcagatcacaagktcaggggttcgagaccagcctggccaatatggtgaaaccctgtctctattaaaaatacaaaagttaggcatgatggtgggcacctgtagtcccagctactcgggaggctgaggcaggagaaccgcttgaacccaggaggtggaggttgcagtgagccaagatcgcaccattgcactcactccagcctgggtgacagagggagactccgtctcgaaaggaaaaaaaaacaaaagataaagttcccaggtcctgaatgattgtatttacagaatgattacatgtgtgggctttaggcttgtactgaacagtttaagtgaggatttttttcattgatgtaaggaatatttatggaatgtctactaagtgactggcactgttgtaagctacagtggtgaacaacttcatgaattacatcatgggccttcataaagatcttattcttctatgactctgtgtaagttgctacctggaatcttttataagctctaagatagaaaactggtagagtwgtttctgtaggtgatatgtggcctataagacctgttgtatgattgagtttaccagcacatttaatgaaagaaagtctcaattcaaagaggggtttgatggctattaaagcatagaaatatgagagtcccaggggcaaactttggcagtgtccattaggtaccaactagaggagagagaattttggtcagtggagttttttgtgtgttgttcctattggcagatctttcccatatatggagatgaatgcattgggctattatagcttgattaattattaatcaattattaattaattaatattaatatttattaatatttattaatatttaggagaggtagcttaaatttctcttttttcgtgctgtgctagtcatgcaaacttgtgattataatttgattttcaatgtaggtttccctgtaggaattcagtatgccacctccatgacagatttctcattgtagaacaatatactggcattctgattttattcatcagtcttgtaagcttggttaaagtaagtctgctcttgagacaagaaatccctctcaggaggctgatcaacatgcttcttagcctgggagagggaggggctataattccccaaggtgacaaatgtcactctgtatggcctcctgacatatggtcattcagcttctcctggtgaacaccagacttggccccatgccttttcatccattctatagccagtcctttaactgtggagaatgacctctgaaaggcttgaccatcaagtcccaaatcagagagctagatacatgtatatttaagaccttgagaaaaatacccagcaataactaatctgctatggggtaattatgcatttaagtacttggctgcgtttacttgttttccaatatgtaacaagtattttccttctgtgagtagtaaccctataaggaaagccttatttcgtttgtgccttgtaaagtgataygctcttttcaatttacaattatttttgcttaattaatggaatattgcagactcacagagaagcacggggaataacaacataccatttgcctaccacccatattgaatagatgttaacaatttgccattgcttcagatctttctttcttttaaaagtcataaaatgctaatgatatagacatgattttctcttgagttttcatgatattgaacaaaagcacgcacatgtgtggctgtggctcttctgttgggtttcctaacaatcacaaggcagtagaggaatatcctgtggctacagcagattgaacaaggtagctccatctctgagttaaaacataccaagatgggctgggcatggtgattcatgcctgtaatcccagaactttgggagtccgaggtgggtggatcacgaggtcaggagtttgagaccagcctggccaatatggtgaaaccctgtctatactaaaaatacaaaaattagccaggtgtggtggtgcggggcgtgtgtagtccagctacacaagaggctgaggcagaagaattgcttgaacctggaaggcggaggttgcagtgagccaagattgtgccactgcagtccagcctgggttacagagtgagactccatgtcaaaaaacaaacaaaacaaaacaaaacacaaaacaaaaaaccaagataaaatcaaattccactatgggttggcaaaaccaagaatgacagcaaaagtggagaaagaaaactacagagcagagaggggcacagatatcccagattaaaggacttccattgtggctcagagaaaatgagcacctgccatgctcttaggagcatgggacccccaactacacctaggtggtgttgccttggtttgggaacacccaaaaggatgcctggccatgcagtgaactgtggagcctctctcagcctcagtctattctgctatatgttggggataatcaaagtacctatttaatacagttattgtaaggagtaaagtagagtaaaatacaacaaccctatgagctagtctaagtagagctgggatttgaacctatgcctatctgattttaagctttttttttttaacccctaaayggaatatccttttaagaaaggcagcatcctggtgtcttttgctcagtcttgcccagctttaaagaatatcactccagatggaaatgaatttggagagacttcagcatatcccagggagagtgctaataataattaataaagatagtgataatgatagcttaaaacaggtagggctcaccatatgaaaggcatggttctaagcactgtactatattaaacttatttaatcttataactagtccacgaaatactcttatttcttacttttttattaccttttttaatatatggaaatgttaagccattgagatctcacttaagtgacttgctcagggtcacacagataatagctcatatccatacagcttgaacccaactgtgtaccaggtgctttgaacgtatttcaggcttccacaaaacttgctgagatgaagatggggctccatttagtaacttgtctaagtcatgcaactaaaaggtaacaaagctggaattctagtgcagactggccagattctaaaacctatattttttttcatgatgtcatgtggctcttttgagcattcttggaaaacaaacaaaatacaaataaaacaaaaaamcaatcaaccaaccaaacaacaacaacaaaacaaaccctaatcactttgcctttcctcatataaccactggtaaagttcttatattctaaagacaaaagtagataaaggagatacacaattttacaatctgaggctaagagtggccttaaatattaccctgggcttttataggtaagaatttaggagaaaaatttacagatagctctgataaattgtgtgatttccagaaacattatgcccgatcagacaaacttttttcctggaaggctggcagaagatacttcaatacctcgagaaccttcatttatcaacaaactctaaagctgcaaatcacattataggacatcgcacaggtttaaaaatgatcaaaagcacttttgagaaataaaggtttagaacataaaagataaggttaatgattctaagtcaaattagtttgtaaattagacatgatattgtgagaactggaaggtaaaaacgtcaaattacaagagggatttagactgccaaaatgtgtaagacaaaatgggattgaagagtggagggaaagtgagccaagtgctagaagaattattctcattagaagggagttcaatgttttcttggttaataataggaatgaataatagaagtagaaaacagttgttttaaaatatgttaatgttaataattgttaaaagaaaaattgtgagtgagccaaacagccagactcattcctgttaaaaggatttcagagtgaatggtagaagtggtgaaaacagttgaagttgtattaaaatgtattaatgttaaaagatcagaaaaagtgttagcttaattatagctattttctgattttgtttaaaagttcaaaaagatgatgatggaaagcactggttctcgttggttcttcttctctcactctctgtcacataggcccaggcatgatctatccccattcaattctcttgaactttaacagaatttgagaagggagattaacttatttgagtgatgagaaacttaccctgcctcaaactcagaaacttcagtaaagccaaaacacttaatamattttatctgaatatatttaatgcacaaaggtaggtaggcagtttttaaaggatttttttcctgagtggagttattgatcccatttaggaagtgcataggcttatgtaaattgatgaagatttaaccagtagttttacatgcttagaaagaaagagtcccacctaaaaattatgattctaatgctgtagtttattcctagaatctgcaaatgccttgttgatatcctagttattggatgaaatctatttgctgctcccatgattttttgtggttggtaaaacaatgcccatttggattttccaaagtgttcattcagtgcaacaatgtggttgagtacctccaacccccagcagtcagtgctacaatcacaccactaaggctccctgcaacatgaactccttttatttccctcccgcccatttaaataggactttgtacgtttccacagtcagcaaacttctctctcctcttaactcagaatctaagtggttgagagtagagtagaaaaatatggttcaccatcattctcagtgtgtgagccgagatggtcactgggcctctttaggcccacatcataataatgtatctgtgtttctctgagaaaagactggcttaacaggaaaatttcatgttcctgtgtgtggggtgcatagaccattcattgtccccttttctttaatagaaataaaaataattttcagaatttaatattcacaacatacctgctctatacctagcaacatgtatgtttgttgccttttcctcatttattttccaaacagtatttgcggcaatgtacaaaaagcatataaagctcaaagggataacaatacatgaagaagctagtgtaggcagaatatgtttaggtgggccccaaagtgcatgctacaggacgtgcctgcttagactagcagtgtgttgagtgctactggagctattaagaaagggggtacaaattctgctttctaccttcaaggagcagatatagtctactcaggaagagaagcccagcacactagaatgaaactaataataggtaagaatgaaaaggtgctgtgaaattctaattttgtgatgtggcctgtaaatgctagggaaaggagagctcaaagtacacgaaagtgtttgaggaagttttgccagaggaagtgggaaatgattcctgccttgtttatttgtaccaccactgttagcaaggagagacaggagcaaaagcctgtagtcagaccttagactacaggctaagagaagtgacagtatgtcatgaggaattatggtttgggtaggtgagaacagactatttaaaaagagagtttaaacatgaggtaattggctgtcaggagctggggaatcacaaagtgaaaagggattttatttgccctccatataaaataggccaaatccccaaacggaaatggccaggttaacacagaacgtaagttgggtgtggtgggagctgtagatttaggaatatcgkctggaaggagaaactttgagctaggagagaagtgaggcttgttaagcagtgatggaacttgctaaatgtgaggtatggggtggaaactcagtttgttagagagtgggagggaaagaacttaagaaggaacagaggrcagcaaggattgaagtgaacgaagagaggacagtgtaggaaagtgttaaggaagggaacgtctcaggaaagagggagtggtgaactggtctaatggtaggtgcctatgaggttaagaactaagggaaaacatctttaatagaaggaagtaactggaggacctgaagaaagccgttttaattttttaagaaagttgaggtttaaaagtcggagggcagaaaaaaaccccacaaactgtaaaaaaaagaaagagggggtggggtagagctaattcaattaatagcttgcaataaagagaagagaaacagtataaaagctttcaggctgactgaaatttggtcaaccatttttaaatcaatcttttcacatattttggctttttaagtatgtgtttaaaatccatggaaaggtaaaactccgtaaatattttctttgggagactcttgggatgtcaccatgttgaaacacatccccggactgatgggacatttgggtctctattcttcttgagcagcatagctgtactgcccacatgatgcagatcctcacctatggggctgatgaccagatgcaccaactaaagagtacagatgatgacaagcagtgtgacacgttggaattagtcatggaaagcaccagtaacttgcatttgttatgggtttctggttgttagttgttgcttttttgtattggggcatcaccatagtaacagtggctttttagcaaacattgaaaatggcttctgttttgtgtgctgttaatatctgtgtatgttattctaagtttgacatggcaaaggttttaatttttttctttataaataatttacttgtaggagaaaatatattttttggatatctctcaaattcattttctttctggattcaagagtataaaaacataaatattttttatctttttgacatctgatttgtttaaatagtgttattctttggctaagcattcgtctggtttcttgtttccctaatttagtttgcctgttttaatctttttttttttttttctggcctctgaatttctattcctaaatgttctaaaatggcatattaaagtaattaaagaatctaggtaagttctctgaggtatttgtttgttatttacctgttccaggcttgagataatttcagcatcctcataaactagttcccattccatctgctttgagaagtaaattttaagttaaaaaaacagatttggcttatttatttatttttatttttactttcttcactgcaatggtacaaaactgaaaagtatgcaagcaatatgtaattggaattacaagagttaaaataagcaatttttgatggcagaattttgctctgttatagcttggctgtaatggaataaatttaagattgagaaatgaaaagattacatagaaagaagagtaagttacttgtgaagaaggaactataaatggagtttcctttgttggcaaatggttcatgaaaataatcmataaatcaactgtgtggatgaaattgggcaagtttagtaacaattgagaggttaacggaaaaaaaccactaaccccaacggtctcaaagtggtttttatcttgttttgcaatcttctttactggaccaaatggtctggttctgggaatcttattgttaaaagatggtaacaatcatgttttacattttgttgttgaaagatcaaatcatttatgtaccaaggtgatcttaacttcatgtccactattatgaaactagtaccagattactgtcacattttacacctgattttctatgtagtttcttttttttgacaaataaaaattgtatatatttatagtacacaacataatgttttgaaatatgtataaattacaaaatggctaaatcgacctgatttacatatgccttatctcacataacttatcatttttttatgatgagaacacttaaaatctactctcatagcaattatcaaatgatatgatttggatctgtgttcccaccaaatctcatgtcgaattgtcatcgctagtgttggaggtggggcatagtagaaggtgactggattatgagggtgaagttcttatgagtgggttagcaccatcccctcggtgttgttctcatgatagtgacagtgagttatcctgagatctggttgtttaaaagtgtgtagcacctcctccctctcccttttgctcctgcttcaaccgtgtaagatgtgcctgcttcccctttgccttctgccatgattgcaagtttcttaaggcttcctcagaagcagaagcctctatgctttgtgtacagcctgcagaaccatgagctaattaaacctcttgtctttataaattaccagtctcaggtattttgttatagtagcatgagaatagactaatacatcaagtatacaatttgcaggtttattacaaaagtaagctacttaggcattaaacttgaaaattctttaaaaatgatccaagacttgggctatatatttgtcaataaatctgtgtctattgcatgactgtgtgcacggaggtagtgttgtagttgtgaggaagtgtatacagttttgtaaggatgtttttgcttgaataatgagagactgttctcagaggaattaagcagaggacagcaatcagagtcacatgccaagactgttgatctaaatctctagctcctgatacccttgacttggtgtctctagcagtcctgattgtactgggttttatgtgtcctccttggttgtcagttcacatcattacagatgtggctgttcaggtgtcatctaggtaagttatagatggtgacatcattgtgtaccaattgtccaaaagtttagggaagaagggctttttttatacaaaaggaaaaacctgatttcttaggtactgcaaggaaattagcttcagtacaatacactgtggaatctcagtgtggaattatcctttaaagcttttccattcaactctctttacagaattctaaccaactccatgtcctgtctgtgcttttatccctttagaagaggggacctcattacctccccaaacagccttttctttctttgggtagttttaatcattaggtaatttttccatcaattgagccaaattgatattctcttgctttattttccattgttttagcttttcttcagagaccaaagcagagcaaacatgtcttctgtttcatgcaacaacacttcagatatttgtgtttaaaatatcaaacacaaattcatcaaataaacagatctccaggaaaatcacctgctattccttttcttttcaaagagcctcagtttttctataacttcttcaagtgggttcctccaaagtcaaacacaatagtctagaatttatttgaccatcttgaagtagagaaagattattaatacagtctaagactgtactatcttttcagtgactgttgagtctattaatctcatattaattttatttttattgttaatgacaagaaccgtgtcacatttatctccatatcttgcttgtcatagggcttgttggcacataataggcacttactctgtcattaaactattccttttattattgtatctatgtggactttagcatctctctgtattgtcattgatagttaaacaaatgggccaatgaaatcagaagctttaggggtggagtccaggcatttttttttttaaagctcccctagtgattctaatgggcaacctggattaatcactgatctaagttaataataaaaatactgagcacaacacaatgaagaacatggccatgcgtcttatcactagagacctccctataggttgctgttgggccattaatcattacattttgtttacttagctagttccaatttctataatgaactgtctttgctggcagcccaatttttgtttaattatgtagtaatattgctctctgtcttaataagcagaaaggctttttttttttttaaagacatctattatagtgctggtttagattatttctacatgtatggaagcagaaggatagaatgaataactgaactttgaagattcctccccaagtcatattcctatgattcttgcaaaccacttagtaccatgtgtgatatttcaaagactcttgtagattcaataccacaaaaacgccattgtcctaagaaagacgattttgaggttagaagcacaaatgagctgaacttctttgcaatgctttgcagaaaaagaaatgcttttctaggtgagaaaatgagctaaaggaatatttgattttttttctcccttgtactctgatatgagaaaattaataaactgcatgttgtgctaaataatgtgaaaaatctatatttgtgctaatgcctatctttctctggcaaaagaagttctataggttatgtactgaaaattattgtgatgcatcattaattatgaaaaattatattagctcatgttattttctcataagtggaattgtcttcctctcatatattattttgtattttttccaattgggtttatcagccatgttgtcttggactgttcttgcattgccataaagaagtacctgagactgggtaatttataagaaaagaggattaattggctcggttctacaaggctgtacaggaagcatagcagcatctgcttctggggaggcttcaggaagcctccaatcatagtagaaggtgaagggggaacaggcacatcacatggtgaaagcaggagcaagagagtgagtgggaaggtgacatacacttctaaatgacaagatctcactagaactcactattgtaaggacagtaccaagggggatggtgataagccatcccttagaaactgccctcatgatccaatcacctcccactaggccccacctccaacactggagattacatttcaatatgagacttgggtggggacacacatccaaactatatcacaygtattgagtaattcttgcttatcactttgttaaatgctctagacacttaaaaacgtataaggtctcagcccttcaggaactcttggaattttgagattatttcacatgcataaatgaaataacagtattagacattacaaagttaagtatgaaaatgaatagtgttagcttataataaacattttcactgtatctgagtaaggaagataattttctaggaagagataaatgcatttcttttcttaaagttgttcatattggtaatgtctttcaaagagaatgaaagaatggtaaaataccatgtttcatttatgtagtgtaaaaatgacctgacttggcttgaaaacttcccaacttgcactatactttgaatccctgtctggatttggggaaccatttggctactcaaaaagccaagtgccagtcacatgttaagtagatctaaacctaaactgactgaagatgatgagctcactgaaaagtacttccagggtatactggaattgaatgctttaaatatgaaaagcagttaattttttttgtttctttaattcaaatgtgagttttatataggcttattaaaatcaatcagatattttgacattggaatagttatgaatttatgttttatcaacaaatagttattactaaattcctgaaaccgttcagggcctatatgctattgcctgtggaaatgatgcctgtgtactttgggatgtacattttttaaaaataagaatatctttgatccctattccttttcctcagcctgttatgctccttcttgcttccacattcctgtggaatttcctccatgattcctttattttccaatttgatgcttgatctgatctttttatttgccagagcttaaattgaaagtggagggaaaaaaatctgatttttcactgattttttttttatccaatatacttctcttaaaggattgaaaacgaagtccagaaaaatatcttcagctgagtcaaaagggcacattgtacttctagcctaaatctcggagtaaggcatttcmgtgtttcatctgtgacattgattcaactccacgacctactgggggaatccagtacctcctaaagttcatagtctctagtgcacaaatgggactcccttggatttgtactaatttaacttatatcaacttttgaaaaagctgcatgcaacctttcctatatcacagcaatttgtgcctatcaaaactcttagagctctttaatactctgcttcttgaagtgtggtccacagacagaccagcatcattggcctcacctggagcttgttagaaatgcagactctcgggccccaccacaaaactccaggtgtatcactgcattttaacaaaaaccraaatgattcatatacatatttgagtttcagaagttctgaactgattctctcttattttagttagtagtgcctggaagattttggcaaaagcaaagaggtggtggtgggggcggggcggggaaagtatttaattgtcaagcacaatgctaagcactttacatgtattatctcatttaatcttcacaacaactctgcatggcaggtattcccatgcaaatttacatgggggaaatgaaggattggaggaattaagagaaaggtcacttagttgataaaacatggaatcacttttcagattcaggactctaagccctcacttttttctaaatatctcttgggaaaattgcactcactcaagtattatttaattggattgttgtttcrttgtggtgaatatgagtagattttttgggaaaaatgtcttcaagaagttcttgaagctttcctgaaaccaggtttgtgaggaaggtctttgttcttaacctgcgtgtattaagtttaaggcttgaggtgatctgtcttgtcacataagtagttcccttcagtacggcatgtctgcctgccctccttccttcctagtggcagcttttctttagttctggaatcagaaaatttcctagaaacccaggggacgctgtgggtcatggctctggctcggccgaggcaagtgccttttagcctttctgggtttcagtttccttactgagggtataggcaactcattttacagtactggaaatgacaattgtgggaagagaatatctaaagcaggcttgacatcttgtggagttatataccaagaaatattaaccatttggggaaaaccagtttctaaaaaagggctcaggccacagacccctaggttttgcctcctccagcccttcaagtcccttgtctcattgatagcacccctggtcaccctcagagggagggatactgggcacagttgtctattcctctgacaagcctcctgattttgttcctccaaaccctctgacttctctggcttcttcctcctgaataactgacacacttgcataagtgtctggatgaactttgttttctaacccttatgccagatggagtgaatcgggaaaaggaacatggatgaggaatgcactagggaagaggattatgaaggcagtgaaatgagatggtggaggaggttcaggaactgcagccagagcccttgattcattcattcatttgttcattcattcattcattcaaggaacaggggaaaggatctagtttgctttatttcacagttttgtacgttaacagttattcctagctggccttcctagtgatgctctggtggatcattaactattaaacaactaagtcacactgttatttgacctgaagcctggtacttagaattgttcccgtagaagtggctcagttgcaaatcagttcagtgacttagaggatctggcctagtgagttttgattggagactcgctgtgcatcttctcaccgtgcagctcttgctctgctcagcatccacatgggcttcttattgaatctccttgttggctcctacagaaggcaaatgcctatttttgtatatgtaatcagggaactccattgtcagtcccccaaagcaaatttatgatagtctttatttaactcagactatctcaagcataacctcaaatttggtgaaaattcctcaaacccgttgtgcatgatataatcacaaaaattaaagattggcactttattcataaattattattgatgtgttttaatgatagaagatgctttaaaactcttttttttttccctgccctcccctacctgccccatgtggagaattttccttctgtatttcctggtcttctattctctccctctcaacacctctactcccaaacaaaagccactcaacaaaaaaaaaaccacaaagccaggtgttgtgggtttgtttgaatatagatttactccccaacctggctgtgaaggggctggagaccaggaaaggctaggactgttgcaggagaacaccttcatgagtggatcagggtcccagttgctccagtaccccctgggcatggcagagggtgctgacaactgcatgtactttccatctgatccttagaggttcaggagaaaattgcatggctacccctgaggtggtgttatttatgtagaactctagtataagaagtagagtgctaggaaggattagactgtgtatcgtgtgctattataactctttggccctttggaaaattctttatgggtgcctttccacattaactggacttttccattgtgtctttcttattgttgtaaacactgaggtcttgaaatttggcctagttcccagactacacagcagtgtgaacatggtctaattttcagaccaaataaacaaagcagtccatctgcactaagttgtccaaagttgtagttcaggaaatgggcttgaacaagccagcccccacctcaactcaaagaaatgcccactctgatcatacaagatccctaaagctcaggataagacgaattcgtgggccaaagctgagggctgactccctagatccccagttgatttaaaaggaggaggcatagatgagctctagccagcagagataggaggcaaacagatcattagggatgccccaggaaagtcccactgaaatacaatctttgctttcttttcttttgctcttttgtatgccttcttcttatctctctggagaaggcatatgctaggtctttttctctctctctctctttctgtctgtattttcagtccctttttagatgtcacaaaaagaaagtaaacattttactgcaactacttaaaatgttatatacgtctaaacaccctggagaaaaaaaaattagtgtgattaaattaatctcagagggaaatttaatttgttcccctgataattatccaaaattagttctttgtagataaattactattcctaggccatttactagctctagaactgtctttcagacactggaaccctaaattaaggctggaaggtagaaaagagaacaaagtttgtgatgctgtcaggcagatttgctttgtggggagacagaggcctgaaagctttcctggccactatctctgttcctggggtctagatggaaaatgagctccctagacaagcccagcaatgttctccctagattgaaaggactggaagtgactgctccagctgattgaattaatgtgagctcttcactgtgctttagtttagagaggttctgttcttcaccagagtgaaggatgtcggatgagggccagtgagtccattaaccaaaaggcagtctagagacttcctagtttctgactcgttgctcacgaaacaccatttgggagaacacaggattgtacaatacttgcttttatgggcaaccctcacaactgttcaaagcctcagtttcctcatctgtaaaatggtgctgaaatagtcacagctcattggattttttaaggactgcctgagatgatatagtgttcagcatagcgcctggagatggaaggaggcaataccattatctggtgtcactgtatgacccagagaatctatgacatagaaagttatatgttctccattatgtgcccaagtcttagtgacatgagatctaaaaggaggaggcacagatgagctcctttgtccataagtgtttagtccacagttttcaaagtttatgagcatgttcctcacttgtaaaagaaaattaaatctgaccgaatgtggtggctcatacctgtaatcccagttctgtgagaggccgaggtgggaggatcacctgaggccaggagttcgagatcagcctgggcaacatagcgagactctgtctcaataaaaaataaaaaaataaaaagaaattaatctatatgtgtgtatacatatagacaatgcatagattgtctttactgttaatatttatatgtgtgtatacacatatatgcatgtgtgtactatatgtttttactatagataatatagatattatattgtctttgctataggtgtgtgtgtgtgtgtgtgtgtatatatatatatatacacatatacatatacatatattgtgtatagtaattaaatgttagtaactttaacatttttagttaaaatatacatgaagttcttttttatttctcatagcccaaaggattcttttgggcacccaggaaacgagcacccctaggggacacgtattcccactggtctcaccaagtagggtaatcttgatactgcattaacctggaaaatcaagcaagaaggcttcctgagggagtcttggcaggcaaggtgctcttgctctattgttcattgtttttgtcatagtatttgatgatcacctcctgaaattgtgtcatcagtttacaagtttattgtctgcttgttcctgcctctctctccacaactaacatacaaacttactcgatgatgggagggtctttgcttactcatgtctgtagccctggctcaataacattattgcctgaagcacagaaggactttaacaaaaattagttgaatgaatgaatgaatgaatgttgggggatatgtgccctctgctctttgcctcctcatacacgttttctgctcaagtctgggagctgaggctcaggagaacgttaagatgatggtggtggtggtggtggtgatgatgagtgtagtcagtattgattgacacactctgcaaagcctcttctgtgattgaggcttcctcagcagcgttcgtagaagagcactgtcgtctttccattgcccctatcctggaaagctgtggactctgcaccaggcaacagtcagctgatactgaggaactaccaggggttcttcctggtatcagtgaggtaccagatgtctaatctccaggtcccatacatgcattcttttgggttctttgcatgaacatgggtaattcacatattttctgagcggtacaaatgccttttggctacttcctcttttatgccagtagtttgtggacacaatccctttttgttttttattttatggcttagagataatctctcccttattagtcaggattatttctgtctctggaatctggattgtaccataaaaatactgtatttgcctccttttgtggcaagaagggctagatgttttccccctcaagctctggaaggttactttttatagttgtcatgatgtacaaatgtttcatcaaatgtgggatgatgatttgatagtgaggaaactgtggtactgattgcaaaagctcctggggcttgtgggattcatagacgtaggcagtgtctctggacaactgctgagctcatttgggtttaagccttctgggatgcattctttaagacaaacatagagatacaagtaagctattatttaaaaagcaaactgatcttgcatatattatgaatgttcttacctggtgtttggttggttgagagtaaaagaaaaaccaactcaaattgacttagtttgagttgaatggacagatcatgtagctgaaaagtccagagatagggctagtctcaggagaggcttggtctagtttctttctctgcatttcttggccctgcatttttagtgcggagtttgttcttggcagcctccccactcatagccccaagttgctgttagtaatctctagggctacttgtttccagattggaatgcaatagaaaagagaaagcttacattatcagcaaatttcagaattgacgtagtttatgtgccagtgtctgaattcaaaattgtaattaggagggtgggccatgtacttgccttaagctaatttgaccctggaattatggatgggagatgaatctatccagttcgtgaaactaaggaatttggcacattgtttagctgatggggagaggaaatagtcaaaggaatattacatgtgtcgttaacaggactgaatttaaagtgctgaggttggtgtttttttttttttgtttttttttttttttttttttttgaggcggagtctccctctgtcgcccaggctggagtgcagtggcacgatctcggctcactgcaagctcagcctcctgggttcatgctattctcctgcctcagcctcccaagtagctgggactacaggcacctgccaccacacacggccaatttttttgtatttttagtagagatggggtttcaccatgttagccaggctgatctcratctcctgaccttgtgatccgcctgcctcagcctcccaaagtgctgggattaccggcgtgagccaccgtgcccagccagttggtttttgatatatttgctagtagatatgtctcttactctcaaaatactaggttagcgtccattactggttgcaatagccattagtgatatccattaatgtttctagctttctgtcttttggacccatggtgactcttttggccagtaagttgtgagcatttgggttgaagcattacatttgagagtgagactgttcagagcttctttttcctctggtaatatacctcgaagcattggagatggtgggtgctccgttatgagtatctgatgaggagactcatgttgggcaagtagcatgaacaagaaacaaactcttactgggttaagctgtgaagattttggagttattactgtagcatagctggttatcctgactagtacattgcatttcttgatacagttgaattatttgggatcactcacaaaaatcctatatttgcataattctttcaatttagcagaaatatttttacatctatgctctcatttccatgatagtcctataaatatatgagaaatgttattagttccattttgccagtggaaaaattgaggcaatctcccaaatgctccaaatgtttgctaatatagcagagtttgttattttctatttgctttgtttacttaagcaatatacttaatttgcatgtataatgaggatctctagaaaaaataatacttcccattttattaatattttatttggtagcccatctctgaaaaatttgtcatttttactccattttctttactttattccccaccttcaccccacccccccaccaagtagtaaatgctggaaatataaaggactttggccactgtgcttctgttgaaagctaaagtaagggagtggttatgtctactatttgtctgcattgagctttgttaggggccaagagaatcattcttgaggggaactgaaagagaatccaaggaaactgtaagcatacatcaggcagtagaacgagggctctgcctgaagggcttgactagagaggagaaggtaaataaactgaatttcctttggtaagaaagtggcagcaggcttgaaatgcagactggaagagagagcaagggcagattactctgaaagcagaagagataactgctttgcaatgaattggggcagcacagtggtgaagagggtgggctctggagcagaatgtctattgctagatccaaatcctggctcttacaatcaccacttacaagctgtgtcaactcgtgtaagttagtaagttacttaatctctctgaaccttggatttcccttctacagaaaggaaataatagtacctatttcataagaatgttgtgggataagatgagctgtaaaatgtaaaactcttagtacacatagtaagagcttgataaatgtcagtaattattaccattcatggtcgttccttctgtccccaccctgatccaagctgtgcatcatctttcacctggactaatgcaaagacctcctcatcgctcttttcatatctattcttgtgttaccactgatttgttttccacctagctagggtgatattttaaaataaaaatctcaagttacttctttgcttaagatgtttcagtaattcccccttcacttaggattttagtctttattagtctttataataaagactcttttggtcttgataataaggacgactaaaattcttagtatgtattctgaggaactactccatctagtctgtgctgatctctgcagtccagcctcataggccctcttctagatccccaagtgtgccaccttttgcctacctaagggcctttgcgttaaaatattttagagaagcaatgacattgccttccaggtggagggttctctactggtgtgacactctctcccaactccattactactctgccacatgtgagatgaagtcattgacccgatgggccaatcttggaggaataatgggcctcagctcatctttgcccttctccctcttggaagcacattttccacagggaacatgtgcttcctcacattcatttacggggaggcactttcccactatgtgggaccctgccctggtctggcatcacctgtgactgtgagcccaagcctacctcatcatggaatctgttaaccattcctcctcactaacaagctaatgccgtggcctctagtttggcttttatcagcaccaaagaggctccgtggagtctactccttttcttctggattgggatgtttgtagtcattcatggtgggaaagtacttctgagaggatagtggtgaagatctttctgtgccttattatggaatgaactgtactcagattggactgtaggcctatagcctatgaaatgactaaatattaatgtgcctgatttaaggtcttaccaatgcagtactcatatgcttggacagggcagtggaaatggaaatgtgttttgcttttggttgaaaaacaaagaaaagtagactggcccagagattttccaggagggggagcccttgttccttgttcccattcaaagctgtgagggttttcatcatctgtgactaagttacaacagaacgagtagaacaaacacaatcattgctatatgtcatgctaagcaaataggagaaaattgtcatagtttctgtttggcattatttatcccacagaattagctctttacctatatggaactcagttttgtaggagagtgtctttataattcctgccgtggttttgacggttatagacattgcatatgtcctttttgcaagatgctaggctaacctctattttagctttaagttagaaggaaaatataaaacagaattaggaatgtgagctccttatttaactgtattttctccttagctttaatcttccccattcttttctccaaatcctttctttagaaaaacatgtgattgacagtaccaacaccctattttgcagtgtgttaacttcttgagtagttaacatactgcaatatcatcattattagctttcagaacggttttcagtacattaatgtgcatcagaccaactaagctggaaactcttctcttgacatctcttcttattttcccagaacttgtagcacaaaactggacaccttgattcctgacaaatgttgtattagtccgttttcatgctgctaataaagacatacctgagactgggtaacttataaagaaaagaggtttaattaattcacagttcagcatggctggggaggcctaaggaatcttagagtcatgatggaaggggaagcaaacacgtccttcttcacatggaggcaacaaggagaagtgctgagcaaaagaagggaaagccccttataaaatggtcagatcttgtgaaaactcactcactatcatgagcatagcagcatcagggtaaccactctaatgattcagttatctcccatcgggtccctcctacgacatgtgaggattatgggaactacaattcaagatgagatttgggtagggacacagcccaaccatatcaaatgttaaaaatggtcatttaacagatgactggactctaaaaaaacagataggagtgatggctaggagccagtgtaggttcacctaaaacaagttaccccaaactaacctcatttaaaaaatattattctgggcatattgattctgaatttcagtaatatctgtcaccccaaatttctcatgttatctttgtggataggatagaattaagcctcaaataatatagttacatggctttacaagtggttaaataaaacatatttaatatgttttatataaaacatattaaacctgaaaaaattgttaacattaatttgtagagaggtctctagtagtttgccatagctttattggtttaattaaaatttcttttggtgcatttagcctgttttttttttaatgtatatttgtctacagctttggaagaacatataaaaggcatgtgtttgaaattttctgatgacacaaagctgggaggaatatttaatgctttagatagtatactcaagattaaatattttttcattaggctggtgtaataggaaatatgaaagatgtatacataaatattttaaaaaccaactataaatgtatagaaagggaaagatgatttaatagtgatttatgtagaaatgatctaggaatttttgttgatcaaaacttaatatgaagatatagtgagacacaattgccagaatgccaatgaaatctttggacatgtcagtacaatagttcagaacacaggacatcaaagtccttactatacatagacttgttgagctagatctgcagttgtgtttggttctaggcatcatgttttaagagagatgcagagaagctgggatggacccaaaagagcctcactgggaagaaatgtctgtaaaataaatcatagagaatggttgaaaggtttgggaatgtctgagtcagaataaatatttatgggagtcctatgagtggttctcaagtatttgaaggttatcaacatagaarggccttagacttggtctaggtgaccccaggcatggaatttgctatgtggcaagaagacacttctcaaaagaagacatacatgtgaccaacaaatatatgaaaaaatgctaaataccactaatcattaaagaaaggcaaatcaaaaccacaatgagatgccatctcacaccagtcagaatggccattattaaaaagtaaaaaaagaaaaaaaaataacagatgttgaggttgcagagaaaaaggaatgcttatacactgttggtaggagtgtaaataagttcagccattgtggaaaacagtgtggcaattcctcaaagaacctaaaacagaactagtatttgacccagcaatccaattactgggtatacacccaatggaaaataaatcgttctaccataaagacacatgcacttgtatgttcattacggcactatttacaatagcaaagacatggagtcaacctagatgcccatcaatggtggactggataaagaaaaatgtggtacatatacaccatggaataccacacaggcataaaaaaagaatgaaacatgtcctttgcagcagcatgggtgaagctggaggccattatctgaagtgaattaacacaggatcataaaaccaaagactgcaagttctcacttatgagtgggggctaaacaatgagtactcatggacatatacagcagcaatagacattggggattactagagtgaggagagtgaaagggtggggtaagggttgaaaaactacctattggatactatgcttgttactagggagagtggatgtcccagctcttgtctaacttggaagaaagatttcaaccaagagacagtacaaagatagcaaaaaattttattgaaaagaaatatattgtaaagagcttattgtaggaaaaatgggtacaccccaaaggaggagtgggatgatcctgtgcgaaaacagttccaaaggttctgcacagggagctttatcatgctggactttttctgcaaattactgcccctgtctcaagtctccacctttctcctttgcctagtttttcccgctcctgccttaactcctcacctaggcttgtgggaccctcccttactgttggttaatgtgcatgtgtgggctggtgatcagtacaaatcctgtctgatggtggccctgctcattgctgccaccccagaaaggttgtatagtggtcaaatctatacctgttgggcctacatatctctttggaatttccttgtgtgtcctaatctgtacttgtggtgccaggtttctcttggtaatgtcccctttgcccatcttttttccttttttttttttggcagagtcttgctccatcacccaggctggagtgcagtggtgcaattccggctcactgcgacctccgcttcctgggttcaagcgattctcctgcctcagcctcctcagtagctgggattacaggcgtgcaccaccatgcctggctaatttttgtatttgtagtagagagggggtttcatcttgttggccaggctggtctcgaactcctgacctcaagtgatccacctacctctgcctcccaaaatgctgggattataggcgtgagccactgtgcttggccccctttgcccttcttattagcatgtagctaacgacattctgacattttaactgcagagtgaatgattattggggtgtcttaagaggcattccgcggtgtttctttctgtgtggctaccttctcgctctcctacccacatatgactaagtgccccccgacaagcattagaaatggcattaatatgcaaattttgggtggtccctcaggtgtgagccttcccagaggtttcctttcccaggagctcccctcctgttaatgtctagctctccacccactctaacatgctctttacctgacgacaggatcattcatacaccaaacctcagtgacatgtagttctctcatgtgacaagcctgcacacatgctcctgaacctaaaataaaagtagaaaaaaatagttattaaaaaaaaagaagttatagggaggcagatttgggttcctcataataaggaccattccagcaattcccgttctgaaatggggacrggctgccttgcgaggcagtcagtttcccatcacaggagatcttctaagacagacctaggagccccttgtcggaggtatctaaaagggtcatgctttgggaaggtggaccagatgatttctgaagttccctcctgccttgcgggctccaacaggaactcaatactgcatacagtaggtactcaagcaatgactgccaaatagttgagtgcttaagtcagaaatctcaggggtagacttttgcatttgatacatatttagttacaggtgagtttatggcatggaccagtaatttcatctagtatcaggagcatatcatcttgggaaaaatgaaggccttgagccacacagagttgaaatttcctagataaccggcttatctttcttactctggctcaggcttgtaggttttagagctatttctgatcatgagcaatgccttgccccaaactaacatgatgctatttcttttccaggataatcgtatccacacatcgaaatataatattctcaccttcttgccaattaatttatttgaacagttccaaagagtggcaaatgcctattttctttgccttctgattttacaggtaatatttaggttgtatttctctattatctgtttgtttaaagtattcataaaattgtaaaaagtaagtcaatttacttagctaaatgttcgtgattaggtacaatcatcctttatcagatttttaatcttgttgttgctgtttcttttcacaaacgtgggagaggtaggaatggttaaaaagtagtacattcatcattttaaacactgaggtcactttaaaacacagccttgcactttatttgaaccaaaccagagcctaataattactgttcacagcctccctcctttctttatctccctttcacatctacagtgtggggattgccagagttgaggcagaatcttaggtgactaagactgagtaggttgcagagcttaattctgcacatttcattttcatttaagaacagtgacatatttttaatatatataaagtgatgatgctatatgttatttcactgtaggtgactacttttacagttttgaayggttaattggtatttagtaacctttgctttttctcctaactaaaatttgcctttaaatgaaatttcagcttttatggatattttgggaaggaaaaacatatgaatcaaggaagctacatatatactgtacacatacatactatacacacacataaatagttcatgttagccagttatttacctagtatttatgttagcatactttaagcagatcaaactggtaggtcaagaatggctaagaagtaagaagatggattagattaatagatttgagtactgttttctctttaattgaatatctatttaagaatatgtttcaagtgacagaaatcttaattagtttgagcaaaagataaattattcatgggtatctcatttcaggtattactggattcatgggcacaatttcatcaggatgtggcttctctttctctgtttttgttttgttttgtttttgtttttgttttcacacattggcctttcttaggtaggccctctacttggtggccctgacagcttcctggtttcaactcaagtcagagagagagagagtggggcagagagggggagggggagagagagaaagagagaaagagagagagagaaaacgaatgaaggaattactttttctgttgctccagcaaaagtcttgagattagttctgattggagctgtatcttcattcctaaacctgtcactgtggctcaagagtttgatccagtaattggcttaaccaagatcatatgccaaaccctggatccatggtggaatcagtttcctaaagttatgtggacagaaagtgaggggatatgatggttccctaagaaataggagtatatttgagaagaactgggtgctgatcaggaaaacaaaaacaaacaatgaataaacatcttactatttgttgaagaaagcttagagtccaaatttcttccccccacctctccccatgaagttgcttttggtttcttcaagtaacacttcacaccattccagaattttgaattcatttctctaatggctttctcatttgtggccaaaggctcttgttcatagaattttatatttagaagggaactttgggatggttcagtctaacctctcctttctttattgctgaagaaattagacccagagagattaggtggtaaagctttcaccatgagttgatgatgaactaggactagaatttagcttttctgacaccaagctcaacatttttactgctacatcagaggcttttgagtttttttwaaaaaatcttacatggaagctgctatgtaaaattgatttagagttgttttgatggggcctgatctttagccactgaccgtctctaccccatcctttcctgcctgatggccccgaagcagcagattttcaaatgaatcccatttgaaaaccacctaagagatttatgtccactgtcactatgtctctcttatgtgggtggctttggaggtatgggcacaagggaatagggcttggagtccaagagacctagtttcaaattttaacagtatgtgatcttggcccagttgcatgacctgttagattcttcatttataaaattgggacatgatacccaggtctgcaacatttcctgactcctggtcacccktcataatgtagtattctgtgttgtgtactgggggtactatttatgtggaatacaaaccttctgggattatacaaaaacaatcctagtaggaatctaactcaatgaacttttccgaggattaaatgatgtaataaatggaaagtacctggcacagtgtctggtgcaaggcagatgttcaaacaatctctctttgggaattggtaaaaagaggagttggtaaaattgttaaaagttgagatgaaaagcagaaaaagatgggtgaaatttaacatattggagaaagtgatcatctgtgagagatttcaagaagcttctccccttgctataaaaatttcagtttttggttaggtagtttgaaaacaagttcaataataattctactctatgtgtcttataaccaaatacaaacacttaaattattgaaagtcattctccatttgtacaaataagtcaatataaccccattaatttgaaattaaatgacacagtttggaagatatattttctaactttaaaagccctaaactatttggaatgtttgtttcagctaattccagaaatttcctccttgacctggtttaccaccattgtgcctttggtcctggtgataactatgacagctgtcaaagatgccacagatgactatgtgagtatttgctcttgagcattcttgaggtctcaatttcagttgtggcttctcagaaatagataatgaagatacatttgaaattttgaatgaagttattttggttaatatcatataaagctattttactatttgtttgatgattaatacaggtgctgtaaaaccagagcctgtttaaaagcaagaaggcttcagtaactagattcactttctccttttatagatgagaaaactaaagcccagaaagagctagtgatttgctaataatacaaccaatttgtggaagagcagaattggaaatcaacctgcattcactcagtgaagtgttacttattctttatcacatgtctttgtttaaggtttgagagctggtaaatattaggtattcttatacattcttgtcattatattaggagttacaaagtcaaatatagttgatccttgaatgatgtgggggttagggacaccaactccctgtacagtcaaaaattcatgtataagttttgactctctcaaaactttactaatagcctattkttggccagaagccttaccaataacataaacagttgattaacacatattttgtatgttatatttattatacactgtattcttttttttttttttttttgaaacggagtctcgctctgtcgcccaggccggactgcggactgcagtggcgcaatctcggctcactgcaagctccgcttcccgggttcacgccattctcctgcctcagcctcccgagtagctgggaccacaggcgcccgccaccgcgcccggctaattttttgtatttttagtagagacggggtttcaccttgttagccaggatggtctcgatctcctgacctcatgatccaccygcctcggcctcccaaagtgctgggattacaggcgtgagccaccgcgcccggcctacactgtattcttataataaagtaagctagagaaaagaaaatgttattaagaaaattatgaagaagagaaatatatatgctattcattaagtggaagtagatcatcatgaaggttttcattcttgtcatcttcatgtttagtaggctaaggaggaagaggaagaggagggattggttttactgtctcaggggttgcagaagcagaggaaggggaagcaggagagcaagcacactcaatatagcctttagagaaaaaaaatctgtgtataagtggacctgtgcagttcaaatttatgttgttcaagggtcaactgtagcttcaaaagtcaggaaactaatgtaaataagtcagatataaggcaatagagaattttaaagtctgcataacccaaaggaagtcattctcactcaaagacaaaacatagtcttgggaaaaccaaacattctaaatccagacaaattatattttcatcctgagtgattgcatgtgccccctcaataactgtctatgccaatgagttacaggtttatattcctagcccaagtcactcctctgagctcacacccatatttcctgttgcctatttttaacccatctgtatctttaaaatggttttcttgtagacagcatatatagtaggctaataatttttaataaaatctgaaaatctctgcctttcaattggaatatttaacccatttatgtttaatataattatcattatggttaggccatctattatctagctgttgctttctatatggcccattggctcttcgttctatttttctctccctacttttagattaacggagtgttttttgtgattccatcttatctatattattggcttaacagacatactttttcatggttgttttagtctgtaatagtccatctcaagcaatctggcttcagaacactggcacttactcaccacacccctctgtgctaagctatatggagaatgcagaaatgaaagagacaccagaaaatgaagttaaaaaaaacttaacattcagtagagggaggtgggtcatgttcatgaacaacaataatatgagataaaaatggtgtgaaattcataatttaaaagaaccaaagtgctttggttctttaaggggggaagatgaacttcagtagctagattgataacagaggtgggatgtgtgaaagagaattagggaagatattatggagaaagtgggaactcacccctgctaagagtagttgagtatggtgaagacatatgggaagatttgtacttatcaagttggttcatgtgatatttcctcatagttatcttacatataattttttgataaatcaacaatttgatgcaagtcattttaaaagagcacacatacacacaaataatgcatgtgtcttcatatatcattttttaaagaatacacaggatataactcttcatttcttaatgaaatttctagcctatttcatggttcacattttgactataacctttgaggttagttagtttttttttttttttttaagacagagtctcactctgtcacccaggttggagtgcagtggcatgatctcggctcactgcaacttctgcctcgtgggttcaagcaattctcttgcctcagcctcctgagtagctgggactacaggtgtatgctgcaacgcctggctaattttttgtgttttagcagagatggggttttactgtgttggaaattttttgtttgtttgtttgttttgagacggagttttgctctgtcacccaagctggagtgcagtggcgcaatcttggctcactgcaacctccgcctcccgggttcaagaaattctcctgcctcagcctcctgagtagctgggactataggcacgcaccactacacctggctaattttttgtatttttagtagagatggggtttcaccatgttagccaagatggtctcgatctgacctcgtgatctgcctgccttggcttctcaaagtcctgggattacaggcatgagccaccatgcctggccccagatttttaacaaacacataggatccatccacactgatgagtaatatcacattaaagtggctaacttgggatgttcctggagtttactgattcctgtgaggttgccgttgttcaaggtactttggggtctcttcttatagaattgtcttctgaaggtcagtgtacaaggtagtcttatgacttaatggcttcacagctttggaaacaaatgctacttctcaagcctaatcaaaaatcttatcaaccagacatgctttctaagagtggctttcatatatttcaaaacatgagacatctcattatgtcttttcaaaggacatagagctcaattctcaaaggatagagaacattctgaggaacgggctatgagctccagaggtaattctaagagaggaaatttcaacaatcatttgagcaatggcatctttggagtaaatgtgtggtttttccttgttatctgatttttcagggaaatggtactcatttagatgcatgagttcctacatattggccttaaaggtcttcattatagtcacacttcatagaggaataaatggtagagtagaaagaatattggctttggagaaagacaccttactatcctaccaccttaccctaccatgtactaacagtttgacatgaggcaaatgacttaacttctcaaatctttccttttctgtataacatggccaatgacaccagagctgttgggaagacagaaagagatatgtgtaaagcatcaggtatagaacctagctcacagggagtacacaatgaatgctagccctctacttcctttctttcctgtggaagttcccctctgagacttcatatttatttcttagaggagaaattgtcaataagagtcaggctggccttgaaactaccatttctaatccttccagactccatctactccaatatcaagtcctgttggtaaaacctgagcagaagtagaagtgattgcatctccccgagagtgagctgctcagcttttgggggatgagctgactggtctttttctgtgatgttcagctagtcaatttaggggatttacatgactaaacaaaaagtctccttttgattccattgcagttaatgcttgaatgtgctttsaccttttgtgatgttatgtgccagttcattaactggacaccttcaccagtcagggtcttggcaaaacacagaggttatcctgaaattgggtggattggagagtttaataatgatgggatcattcacaaagggtgtgggcaaggaaaagcagctatggcagcaacatggttggcaatactactagacctgaagaggcaaaggaatgaaggagtgaccagacctggagacgtagttraggcctgtttgtagcagctgtggctatctgtggaagcagccattgctaacccagctagaagaaagccaggggataaattccctcatttcactcttctctgactcgaatcttctgccagtactatctgttggccaaatcttaccagaagccacagggcagggaccacagagcccaacttttcatggcacagggcagagtggagacgaatgctgtgtagatatggtggaggagagaatattcagcaacccttccaaattgtgcactcagatcaaataatgtttccatttctgttgttctactcgtaggaagaagttttcatgtcaatgggtgacgtgtgacttaatttacttctttaccaatattataaactatttttatgttaacaaatgctaaacagcttgttttcttatttttactggtaatatctattaacttatacctgtcattctgagtaattgtatgtactgggcatagcataatagaaagattgggatggatttgggaaggctgtagaaaaaggaaaagggctggttgaagcattttgtattttgtgattttgacacaacatkttgtatttaagaaaaaaagaaaacattctgatgattaaagtctatgaaatcgaagtttctgtctcctgaaaagactacccctattcatctgtgcatgtaggctaatttgctgaaataactatattatagcctattactaatggtattaccattttctctatattacttttttttctcttatagcctactactactatctgatcttgacatttcacataggaagacttacctgaatgactgctaatttatgagcctagtagagagctcttaatattgagattctttcaagctatataagatgcttacattactggattaaacaataagaaatacaaccatttggacataaatcacaaatctacaccaaatgtgtttcagtattggattctaatttttgctttaaatgctcagtacttcataagatcactgttaacaattagagtttctggagaataaaaattgatgttgttacaagtaacttcttgacttcaaagaaatccataaaacagaaagaatgatgttctaataaagcattcagtacacatgggagagaaatggaagccccattccttgttaaagacatcaaaattaatacatggttttctctgagactataaggtacagtagagagcatattgtcttcttagaagcaactaaacgtgtggagattggaagagtagtggctagccttgttgtttcattggtgacatccggagtgtaatgtagtgagaagggttttgatttagatttagaacatgtagagctgggttcacaggaagctcaaacagtgtcatcttagaccagtgacaacacagtttaaatggatgaactcaaagtattgccagtgtgcttatttgggctgacaaagtaccttgtaatgtgttttctcacaaacactttgatttttcagtttcgccacaagagtgataatcaagtgaataatcggcagtctgaagtgctcatcaacagcaagtaagaaatacattctgtgggttattctgaaaatttctaggaccctgaaacagctcttgacgattggtggctttctcttttaattagatacatgattcttttttccctttaatttattaaaaattgaactttaattccattttatcttcatggctctcttttatgttccgcaaatgcttgtgctactcactcaactttgacttcagattcctttggtgtaccttttatggaacacagacacatctttgtcactttccatttctagatccagtactatttagaattggtgcatatggggttctgtatgtggtagatgtttcatgagtgtgtgaattatttaatttggtaatttctggggaatattgctagagagacttctcacacattactgtatcaagtgatagtgataagaattttgtattcacttgatagtggaatatacatgggccatctaccatagtacaattttttcattgcttttatattcatccatcaatgaagaaaaagtatttgtgggaacagtgctagaatcagaaatgctttaaaaacacatgcatttatccacaaacgactgcaaaaacacctccagaaaacttagcaggggtaattttaaaacttctttccatcatttcttactctcttttttgctgtcccccccttatttttttgctaatgataatgtggcaaagtaaattttaatgatgtacttaaatctggcagtcagtcacatcaggcaatgattttgaatcatttggataccgtgaagaatgtaatttttaaagagaaaatcataaaatgaattagccatatgtgagggaaaatgctaaagatatcaagaggggctaggtagcttaggcaatacatggtgatattgaagtaatctctataactaaaatattgattgatttctaataacataatgaatacctacagtttttcttttggcttgttttagaaaatggtgtaaaaaggacagtgaagaaaaatgatcttaagttaaaaccatagttgtagagacagagccttggaaagtgtgatcctggtgtgacatggataagccataaaggtgcctggacccccatggttcaattccaggttagctggttttgaatcattgccgccacaatatggtgttaaaagtatgcattttgcactgagagacttaagtatgagttttgtcctactctgaataattctgtggtcttggggaagtttttaatatctgtaagcactggatttctcctctgtaaggtggggttataatgtgttctctcccatggatggagttgctgtgaaagttaaaggagttctgtaaaatgcttggcccagtgtcttgtatgttgttagcattctccatgtagtcttgttacttctttaaaaggctctttataagacagagtatgtgtggttgtgggtagcactgttgcatatcttgactttctcaagtctgaaagttctgactgtgtattagatctgatgttaatacgttcctttctcaaggaacatctaatcatcagtctcattactttgaagtctcatctcatataaagtgtgttaaaagtaaatacacttacgtagtgaatttgaactaataactctagcatatcttttaatgtctctcaaattaccagtcaaaatacctggattgtgatagacgttggggcctctatttggaggctatgggattaatccaataacttcgatattcagaaatttgatgactatatgtctcccacacatggtgactgtcattatcattatcatttgaaatagtgttagtgttactttcttgtggttttatttagctttttgttaattccttgtgagatagtatctctttgtaactcaatatggcatgatgtattgaaaagcattgttgccgatcctgtaaagttgaagggagaatcatctatcattgagaatggaatggagyattttttaggattcagtgaaaaatcaggcaaaaatgtccatttgagagattatccacaaccttgagcttctctagggtaggggtcctttctcttgattgtgtttgtgtcccttgagcctaccacagtatctgttgaattttcaaactatgctgtaacaagtccttgcagagagggcaacctacaagacgggcttgtcctgttaaattttgctaaatcccatcattagccaattccagtgcatatggtggtttctgtagaatgtgctcaggctatggagactggcttttcactttttggattttgagatattggggaaatcggttatggaggatgctgttggggttctgcccagatctccctgtcttcctgtgctcatccccaatcacccatgtgcattacttctatgagcttgcacctgccgctttcttcatggcttggcccttgggatattggacccagtgaccaactggcgcacgagcgtcaaacagcagctctcctgcctcaggttggacaaacactgaggtgtaacttgcactcatgagtgccccttgagctcgggctgaggacaggacttgcctgcaatcacgctcttgcttggcttcttcccctttcctctgttgcttctcatctcccttcccagtttctcctagaaatactttcttaatgaaccacttgcatgtgaatactcatctcaggatctgcttccagggaagcaggtataagatagtagttaatgcatgattaagcccatggcaatattaagagaaaatatttaaaaagtgttttggccctatccttggcatctgtgggccacaattcaggaataaagtaaaatggctggaggggatctgggctctgggagtccaggagttgctggggtgggtgtcacattgggttgggcactgccaggtgcttgtggcttcccttgtgtatttctggcagaaggtcttggacttagggtcttcaaactagggcaggagccattggcatgtcctggaaggaggcagggtataggcagctttggagaggaggaccctaaagggaagaaagtgggatgaaaagtagcagtcaggaaacctgggtccttgtaagtgattactgtgtgactttgggcaattgattttccttctgggcttcaggtaccccttctcctgtgctcaggagccaggatggtgggtggctacattcagattcaacacgtttattgagcaactactatgtgtgggccccagtgctcccacacttaagtctcataaaaccctaaggtgtgggtaatagtgccccaattttaaagatgaggagattaaggcccagaagggatgactagcccagggtttcatggcaggtaagagtctacgttagagttctatccattcatgatgcaatgtgtcaagtgtggactttgtggtctcatcaagtcttctctatttattttatgtttgaagggctttgtatacaatcatatacatataaacatcattatgtaatatatatgtagtttacctatatgttaatttgcatatgtaagtacacacatacatccacactttcagtgcctggagcattactcgtaacattcttagcaccaagtgaattataatgtaaacctcagccacaatataattatggaagtgaaacccttcccttctaaccttcctctacaatttcacttttttttttgttttcttaatctattcctttcaaatcaggacaaatcttttgcctttacaaactgttgtaatatgtgaaagtgcttaagaaatgggtgttgtattagcttttggtaaaatcttttgatgacttttgttttaaaagtaagtagcggtggcatgattccttcttgtagacgttaatgtgactgctgcacaagaagtgcacattctcagccctaggctacaagatactgttggcaagtctgcgagtaccaatacatacttaaatgtttcataagaggatgtttcctcaagtcatgctaactattcctggccaccgtgggagcaactgggcaggtgaagggcaaatgagagggatcctgaaagttcctgcagaggtcacctaatcccacgctcctcaaactggacatcacattagaatcacttggaggagttaaaaaatacccacatcccatttacagcccagagcaattaaatgagggtcttggggatgaggccctggtgtttcttaaagtttccaagatgaatctaatgtacagacaggtttgagaacctctaattgaagccatgtctttacccatatctgtctgtttatacttatattttatgtctaattttaagagacactcaatggccgggtgtggtggctcatgcccataaacccagcactttgggaggctgagaaggtggataacctgagatcaggagtttgagaccagcttgaccaacatggtgaaaccccatctctaccaaaaatacaaaaattagctgggcatggtggcaggcaccggtaatcccagctacccaggaggatgaggcaggagaattatttgaacccagagggggaggttgcagtgggccgagatcatgccattgcactccagcctgggtgacaagagtgaaactctttctaaaaaaaaaaaaaaaaaaaacaaggaaaggaattccatttaatccaaaatggcaagcatctatacaccgttggtgggaatgtaaattacttagtcactgtggaaagcagtgtggatatttstcaaagaacctaaaacagaactactatttgacccagcaatttcattactggatatacacccagtggaaaataagtcattctaccataaatrcacacacacacatatgctcattgcagcactgttcacaatagcaaagacatggaatcttcctaaatgcccatcaataatggactggatgaagaaaatgtggtatatatacaccatggaatactacatagccataaaaaggaacaaaatcatgttctctgcagcaacacggatgctgctggagggtattatcctaagtaaattaacacaggaacagaaaaccaaataccacaagttctcacttataagtgggggctagttattgagtacacaaggatataaagataggaacaataatcattgtgaactactagagaaaggagaaggggagcaggacagggattggaaaactacctattgagtactatgcccactacctgagtggtaggatcatttgtatcccaaacctcagcatcacacaatattcccatgtaacgatcctgcacatgtatcccctgaatctaaaataaaagttaaattattaaaaaataagatggtaagcatagtttttcacataataaatattttaaaaagcygaggattctctgttcattcttccaggctgctagcatcccttctttgtgtcattattaacaaatagagtccatatcacttcttaacatttttacttctccagcatcttctaaacttaagattttgcattagaacagtctgagatcagatgcttcagtgcaattacccttcatttagtcgggatatttccctgacacttttagattttaaattgtacttgactgtaagctttttgtgcaacattctactttatactttcctgggcattggtaaactttgcttaaatctctgaagctctcataggcctgtttccatcaatcttattcatttttggaaactgtattatggggaaaggaaggagctttcttttactactgtagagtattgtctctgcactttccaagtctggtgtttctagatgctgcataattacctgaacaaatatactctttcaataggaacaacttgttcaatcaacttttctagtttgagtgatgactccctttggatattaggatttaaaattctgttttattttttctttgttgtatatttttttcctttataaaagcagcatatattcattaagagaaatttggaaaacaagaaaaagtggatggaagaaaataacattcattcttccactatccaaagtaattattgttactattttcttatatttcctctctgtctttttttctatgccaagatttcttataattatgtatttacatttttatccttctgcttctactttatatcatatcattatgatttcttatttctttatacatacgatttttaggggctacataacattccatccagtgcatatctcacaattcacgtaccatttctctgttgtttggatgtttgttttcaattttaaaatataatttcttgatctttcttgatctagaaccagaaataccatttgacccagcaattccattactggatatttgcccaaagtattataagtcattctaccctaaaagcacatgcacatgtatgtttattgcagcactatttacagtagcaaaaacttggaaccaacccaaatgcccatcaatgatagactggataaagaaaatatggcacatatacaccatggaatactatgcagccataaaaaagaatgagttcatatcctttgcagggacatggatgaagctggaagccattattctcagcaaactaacacaggaacagaaaaccaaataccacatgttctcattcataagtgggagttgaacaatgagaacacatggacatagggaggggaacatcacacaccagggcctgtcagggggtggggggcaaggggagggagagcattaggacaaatacctaatgcatgcagggtttaaaacctagatgacgggttgataggtgcagcaaaccacaatggcacatgtatacctatgtaacaaacctgcacacgtatcccagaacttaaagtaaaattttaaagaataaatatttgttgaatcaaaaagtataatacatgtaaatccccaaacagtaacaatttaaaacaatttgaatacgttttatattacaataattaactatayagcatttaaaagtgaagtatataaagtagtagttctggtctgtagcatcttgatagcaaatttgtgtattgattcagaggggtggctagcagatccttcaggcagctaggaaggacctgttcccaccttccttgtacttccaggttagaggcatgtagacctatggtcaagagatttataatttgctgctatattcttggaaacaacttaccaaggaaggtggtggtaggggggtggatgtatatgatatggccttctgctggattttatccagtatgtcagtcttgggtaagtgtgaattactactcttattaaatattctcttactttttctatttgagcacctgcaacaaaaaaaaacccaaagatcattgaactcagtgtatttgcagcttacacacatttagtgtgtctgtgtgtgtcttgtaagtgggagagtgggatcttgttgatcacatgggagaattgatgtaccctccattgagttattccctttcaattgtgggcttgaaattagagtggttaaacacaaggcacaggaccaactaccggagtcttttatctccagcccacccagattacgtatacattatgatggtaccactggggctaggggaaaggtatttagggtctataggaacagacttgcagatttgaaagaagattttgaggagaaaaacttgattctttttttaaaaaacaatattaataaaacacacttttatgggtgtaacagccataggcataacaatgagttcaaaagcaagctacmaagagtggtctcagtgctttttgaactcagtgaagtggtttaaaaatgaatattcaacttacagtaatagtgcttcaaaacaattttgccttcaataagttaatttcagcttcttaagtcttggattgatcatttcttgggcagtttctggttctcagctttgcagatgraagggttcctttgccaatgggctggtttctgtatgtgagccgtgacattattgtagttcttttaaatgattttccactgtaatcagttattatattgcatgaatacaatttcttaagggttgaatttctaaatggtgactatttctccaaatgaggtacatcttgaaataagaggaaattataacactttcaaaactctgcacatgggtttccagtggcatctcttaatttctttttaaagtttatgtgacccagatgttagctgttctctttttctcttcttaaagctccttcaaagagccctctcacataaaaggcttagagggcaaggtagagttgactgaagaatttgtgggggagaaaattgagggggtttatttcatacactccttagccagcaacatgaaatcccatttcaacatttttcttcaccaaagttcycctcagtttttggcctttttaatgtctccttcccccattctgtgctcagtgtagctggctccagtctcccctgtcttggtgtctggggcccctcaaattgatctcccccctattacacaaagtagtttgattctccctcagctctgaactcaaatctattgcagcgaatcaccagaatagcagggtcttttgtaaccaggatgcatttatcttagatgataatggaagttaaagatacaccaagttctatgtgccatttagaactctgttctttctcttttttaaaagaataggtttatgcatcttttctcagttgttattgggaggagatccagaatttcttttggaaagaaaaaaaaaactcaaacctcaaccacaaaggccttggagatgttagaacattaattttaaaaatataaagttttcttaggatcttaaaatctgaaagctaaaagagatcaaaatattatagtgaagaaatttggtttcattcagagctcaaaggttgtctacaccaaaccaaaccaacattttaacagcatttgttgattatttctcatcaatttttcctcccagcaaatttttactacaggggcattttgctttacacttcctgatatatttcaatgggttaatttcttccatgcattttaaattggtgtatgatgtttttgctgtgtgtagtaaattaagaaaacttggaagagtacaaacaaaacatagaaatcacccttgatcttgctacccagatcagagttaactacaattaatttgtggatgcattttatgattccctctccttcatctttgcttcctcctcttctttttcctctctgcttctccacacaatattccttttaacaataatcgagattattttataccacgtcctactgtcatggttgaatagtacaaagatatttgcaacagaatctgtaaatatgatcttagttggaaaaaggctcttagcagacataattaaattaaagatcttgaggtaagatcatcctggattagggtggactctaaacccaaccaccagtgtctttatgagagaagagaaggaaagaagagacacagaaaagaagcttaygtgcaggtggaggcagagattggaattacatagccccaagccaaggaatgcttgaagctatcagaagctaggagagaagcctggaacagattctcccttagagtctccagagggtttacagccttgctaacactttgattttggaattcttgcctgaagagctgcaagagaataaaattctgctgtatttttctgtttttttttttttttttttaagatggagtcttgctctgttgccaggctggagtgcagtggcgtgtggcgtgatctcagctcactgcaacctccacctcctggattcaagcgattctcttgcctcggcctcccgagtagctgggactacaggcgtgtgccaccaagcctggctaattttttgtattttagtagatacggggttttrccatgttggccaggatagtctcaatctcctgacctcatgatccgcctgcctcggcctcccaaagtgctgggattacaggtgtgagccactgcgcccggccaaagttgttttaaagcagttggttcgtgatgatttgcttttaagccacatagtttgtggtgacatgttatagcagccctagaagactaatattcacttctttttagcttttacttgagaggttctatgttcgttcatttgttcgttctttcactcagtagacacttattctctgcctactatgtgtcaggcagaatgctattaggttggtgcaaaagtaaaagttattccacaattacttttgcaccaacctactatatgctgaggatacagaatttaataagatatagtgttttccccaaatataatgcaatcatatgtatatggtacaggataggtttatctgtagaattgccaggatactctcacattttgttgtttttacttctgggtaaggtgtgtgagcaaaatgactcatctcattaggaatgtgcagctctcaaaagttcttgtcagtatacaggctctgcagrtgaaacaatgcctggtggtagaaaaccttggtaggttttgggagcctagttgggaatggtgctttgaagctgtaactcaggaacactggaacatttttaaacttgaccagttttctaaaatactgagatctatttccttattccatgttaggcatgttctaattctctctgcttactgatctttgacaagaatcagatgtgcaatactggaaggaaaaggaaaagatagaggcagacagcatagaaagtaagagtaatgatctctaaattagatctaaggactcaaaaggacctgggaaatttgggggctgtaaaaagtaacatcatcagcaacatatggaaagaagactctggcagtgacattgtggaagagctgtgagatgaggaagmctgggaaatataattgagagtgatactgaatattgtagaaggaaggtaatggactctaatgatggagaaagaatagattttgaagatgtgaagaaagttgatggtattttctaatggagaatacagtaagtcctcacttaacattgctgataggttcttggaaactgtgacttcaagtgaaacagtatacagtaggtcctcaaataacgttgttgagttcaaagtcatttcattatagcatgggtgaggaaaaacttgattttgttacatttcattacacttaaaatcatagttttcgaggacctatccacgacgttaagtgagaacttactgtctatggtgcaataaagtacattttccataagcttagcattccttcacaataaacacttactggattttaaatttgcttaatgtccagtgttcagtccagtatgatggagttgcagggggaaagaaaaaagttaagtattgagaaatggaattgagtttggagagggcttcatggaggagagcacacaaacagcagtggagatttaaggggctctgttggcaacgggacgaatttcattcagataatctagctggctcagtgtcaatcagcatgtactagggcttcctcagggatatgatagaggttttataggaacattgagagtagcagcagggattcatgttttccatccatccatccatccatccatccatccacccatccatcccatatttaaataacacttctgagtaccagccactgtgctagatgctacggacacatggactattaggacccatgtcactgccctcaaggagtctggggtctaggggaagagatggacaaataaacagactcttatttgacagcagtaggtgcaaggaagtatgaggtgctccaggtgcactgggtgctttgggtgcacacatatggggtagggatggctaatactagttttggagggctagtggcagggatttcattgtctcagaataacccttgatagaattggccccccagcaaaggtcagccattgaacagctaatggaatggtggggtgagagggtggggagagcattggagaacccaggaacagttcaggccatagaggattactaggtctttacaggcttattgaagagggaggctgagaatatgctggatgaaaaatgagcccaaatccaccatctcctgtccctccagttatgtgctctggtgcaatgtggtccgtcacaagtaccatcttcatatgcaggctactcattgtaagactcttgggcaacacagcagtgagaacctctgttgtctttctaccccacaaggcaggaaggcattgggaaaagtccactagcctggtgtcaggaggctgaggttcagtcctgctctgtcatgaattggctacatgactgaggaccaaggacttgagttttctcatctatgaaacaaagatattggataccagtcattttcaaacatttctttttccaataagcagaayccttttcaaatgaaatcttatgtatagtgcagttgctcagagcaggtgctctcggctgccctctcaccctttatggtagatcttgaggagcctccacaagcatcacagcactggtcagtacttctgcacatgaggtctgaggaccacctgcatctgaatcacccaggtgcagattcctgggctctttcccggacctcttgaatcaaactttttgggtctgggactgaggactctatttttaatgagcacttcatgggattctcatgtacattgaagtttgagtaccactaggccagatatttcaaggttcctctcaggctttaagtacagtgactctgtgatcctcttcagctttggtgtgatggtgaggagccaaagaaggggagtcagtgactccacctgataaaaagatttaacagcaaatggaatattgaaagtatgaggatggatttgatagtaatagtagtagagatgacagtggaacaaggagggtaggatctgaaagttacaaaatggattaggtaaggaagaagaactttaatcatcgggtcttccaacagtggagataaattgtattccagatggaagaaattgtagmaaaaggtgtcaggagacaattcaaagcatgaggctactagggtaatgtcctgatcatattcccaccatctttctttgtcttgataatagcactctattatatcatgacacatagtatcataatggtctccttacctttcatttacttgtcaatctttattgagtgaatcctgtgtgccaggcattgagctatattctgcaaatgcaggtcaacccaaacagacatgttctctgcaatcacagagcttagtgtctggtcagggaagtagataataaaatagccatgctaagtagtgtataattacaaaccaaggcaaatgctgctaaggaaaagagtgtggttctaaagacaggtatttttttgtgggggttggtagaggtgaggtgaagcagtttaggaatggattctttaagggagtagtacatttgagctgaaaacataatgatgactaggagttaactaggcaaaggtggtaataggagttggagcaatgggatgagaagaattccagagggaaaatcatgtgcaaaggtcctgtggaggggaaggaggatggtgattatgagggactgattggcagaagtccagagaataaggcggagagaagagcaggggcagacagggctggagaagccatcagaggccagaccctgcagggccttcaaggctacattaagagtttgggtctttttcctcataacagagagattgtgtggaagggtttgtctttggaaaatctcatacctgctgcatgggaagaagctaatgcagaggggtcaagatagatatggggagaggctaattgcctattgctatacttgtctgtctgttcctattactgctgtgacttacttgaggctgagacaatctccatattcccatgcagttgatacgcaataattacatgatagtgggcaaaatgcactaaagtgaattaaataaagcctcttggggmaaaagcagaatatattttagactcctcttttcttccctgtaactaatatggggcaaggagaagtattcatatattgtgtgtttgtgcacatcgctgctggctatcattgcacttgagagtgtgaggtcctcggataccaagcccatctttaccctagtgttctgtgttattgggagtctcttgggcactgctggaaattaacatgtatgggacagtgtctgacacttaaggaaagggaaggatttaggtctgcctggacttcatttcttaattagcagagctcaagatatgatttgaagcaatgcttactgtttcattcgcagctgcccccaggttgcagcaagttggacaagcaaaaatgtgacaggcagccctagacacccagtggagaagcagaaatagacttgctggggtttgcagtggacgtttcccttgcagcggcactttctgaattgcctggacgacgaagagtattcacccagctgtcctcatctgttaccttgcccctttccaggcatttatgttcttacatgctttcccctttcacactgctaaatttaaggcttcattttcaaatcaaatgctcatctggctggctgcctgagaaatcacatgtggagcactgagagacccaggcaggggatgatgcccttggttttggagagtaggtctggaaaccatatgaactgtaaatagtttcaaaatgtgaaaaaaaatttaaagctctgccaaaagggaagagctgaggtttttttytttctaggctcagttattaagtatctgttggaaataacctacctctrtcatagaatctgtttactctctccgtctgtccagggtggacaaatccagacttaaccactgtgagaactcagctctgcaaatgcttgctttattagaaataagttttggggtcacagaaccatagctaaactgctagatgcataacttttatgggaatttacttttattcatttaatccttcctttgaaacttgagtgataatatgttaatatttttaaaaataatagaacctaattttccagtaagaataagacaaataaaaaatgagaaaaggtacatggcttccttaatttgcaccccatcagataactaatgtactagagtatcacttctcattttgagaaatatttttcagcatatgtcctattttctttattagtctttctctttttcacctgatccttcattatagttttaaaaggctttttttttttcttttttttcttttttttttttttttgcctttggtctcaattttttgtgggtgcagaggtgaagagatgctgtcatgctttccacactaggttaccagggacacctttcattctgttttggtggctgtctttagattcttttttcttgctttctctgtattctaaattttgtctttgctctgtatctcatttcttactctctttctaaggatgaagaagaaagaacactggaattgagataaaaagaatgataggaaaacaataagcaacagaggccctattaaatagggagcattttagagtaatagatgcctaaaaatgtagggattagagtttatgcaaacaaatatgcaaaggactgtggtataaatgcttataattggcctgcagatttgcttgtgttaaatttcaaatctggtactgataatgtcaaactaataaaagttttacccaaatgtacctaattatggtcacgatccctggcacgaaatctcctgattaaccaaattgaaaatatcgttcccagtagtggctcttgtgattaagaaaggaattcagaagagagaagattatttatacatatatttagacatatttttacagactataaataagaccataaggtcttgaaaccccttgatcactagaaagcagagagggcttggaggagtatgagaccagcctgtcattgctattaagcagaaaaacttcatcctggagctgggtggagcacataacttagagtgtttyccagaaagtaattaaaagggcaactttctggcagaaagttttcatcttcctaatagagaaaaatggagtctactccaggcaaaaaattatcatatagatatatccagggagtagaaaaacaacctagagactttggggtttgagtagtgccaatgaataatgaagggattacattagaaggtctttcttatccatctcattcctaaaatatgagaaatgcaactgccatttgatataccatccctgagcccaaggctttcccctgttccagggacttactgtggtcagcggggcatggggaaacagatttaggaccttcaccagaggccaggtttacccagacctgacgggtctagaaatagaggattttttggggcactctagttcatgtcataggttgggccaggggagcgtgtcgcagttcctgcttacactctaatcctattggcttgaattggaaaaagtgataagcctcaataatacagccaattttgttggggtcatttgatttattgtcccagcattgttaagagcagacatagcatgggtgctctgaaccagaggaatctttaggtctatcttatttctgcagatagtgagtatctcccatgtgccaaagatgattaacgtagcatttctgttttcataactcacagtttgtagggcagggagacaaccaagtttttagtttcaatataatgtataggaggatggatgtgttgatggacctcaacggaagcactaaagaaggggtacttaggccagtctggggaacaaaggaggcttctgagaagtgagtttttatctaaaatttatcaactaaaaatgtgaaaaactcagaaaagtaaaaatgtctactttttagggaaatgtattatcccttgttgttgcatttttttttgtggcaaatatacatatatgcaaaagagcccatgcaatatatgcaattttgctttccacttttttcctttggaaaaaagtttttatttatttcttttattgtctaaactgatatcctttgccttacaatgattcatcctgtccttaccctctttccagactttgtcattagctttgttacactttcttagggtcttcccaggagacatagccttgtgaaactattactcgtgtcagctctagaactaaatatgctatgcacacattatgagtgatcacataaatagctaatctgttcaaatattccttcaccaatatgtattgagcccctaatatgtgccacgcactctcctatgtactaaggatacagaaatgaggaggccagataaatccctgccctagtgaacaacattctagtgtggaagacacataataaacaaaatgtaaataaataatataatttcaagtagttgtaagtacaacaaagaaaatgaaataggggaataggatagagagtgatgggatgggagatggggagatgattttaaagasggtgaccagagaaggccccttgaagaggtaatatttgaactgagaggcagctagccatgccaagatcttgggtagaagaaacaacaagtataaaagctccaaggtggaaatgaacctgacagtaagatgtctactgtggctagagtattgtgataaaggggagtgctgaagggctggcaagagccaattcctagaggtagtgatagagaattccaattttatgttaaatgtaatgagaagctactggagggttttcagcaggaaaattatatgaacaataaaaagatttcgctggcttctgtgtagacagtagacagcagagagagacaagagcagaatgacggtgacaaattttgttttctactcttgtccaggtatgatgatgatgccatggacatgagtgttagcagtgaaggacataaacagaagtagaattatctatctatctatctatctatctatctatctatctatctatctatctatcataatcaccatcactcatggattttcagacacacatgcacacacaaatagaacagtacaatgaatccttttctatgtattacatagctgcagcaacttgctattcttgtatacttgcatacttcttgctattttgtatcaatttttattattttattttctggggtattttaaaagcaaatcctgtatgtcatattctgttatctatcaatactttagtatttatcttgaacatataaggatttacatatatttagccatactaccattactacatttgacaaaatarcagtagtaccttaataaatatcacctaataaccacagactgagatgtattttgagggcagaggcaatatgttggtgtactgggtgggtatgaagagaggcatcaggaaacctagttgttggctgaggttccaagatggagaaaactggggaagaagcatgtggtggtggtggtggttttctgcctggtctaggaaaccagaattctatcaagatattagtcattctrtagaggaatgcattactgaagcttaggggagaggtgtgggctgaagatataatttaaaagtcatcacactttgggaggctgaggcgggcagatcacctgaggtcaggagtttgagaccagcctggccaacatggtgaaaccctgtctctactaaaaatacaaaaaaattagccaggcatggtggtgggcacctgtaatcccagctgcttgggaggctgaggcaggacaactgcttgaacctgggaagtggatgttgcagtgagccgagactgtgccattgcactccatcctgcccgggcaacaagaaaaactccatctaaaaaaaaaaaaaamcaaaaaactcatccaaggcctgttgcagtagcctatgcctataatctcagcactttgggaggccaaggcaagcagatcacttgagagcagaaatttgagaccaacctgggcaaatgggcaaaaccccatttctactaaaaatataaaaattagccaggcatggtggtgtgcacctgcagttgcagctactcaggaggctgaggagggaggattgatgcctggaaattcaaggctgcagcaagcagagatcatgccatgcactccagtctgggcaacagagaccctgtttcaaaaaaaaaaaagtcatttggccaccttggatgaagattctgggccctacatagtggagagaggaactctagctctcaggcactctaaagtttgaagatgggcaaaagagaaagggctggctaagtgtgtgagaagcagtgactaatgaaataagaggaaaactacttggatgttctggaattaaaacaaagaaaaggtttgaagaaagagggggtggccaactgtgataaataaagtgaagactgagaactgatcattggatttagtaacatacaggatgaccagagagattgcagttggaaggatggagacaaaatcctgattggagaaagcatggacagtcaagaagtagagaaagtgagtgcagatagctcttttgaagacttgaaatcaaaatcagaatgtacaatccttataatgaggtgcttcataataataaaaaatagtcacagtattttaaatgtatatattattttacagtttacaaaatgctttaatgaatctatttcatctgaaagtaaaaaatgtcatgaaagacaggtgtttaaatgttaggtgggtttgtggcatttcaaagacctcagttttctgaataaagacattctgaggggttgataagagccggttttggtaggtcatagcagagaattccagtctcaatcaatatcttgcctgaaggctggttggttctgaagctttgactcaagtgcatgttttccagttctacaacatgtactcttctactatgctacatcatttccttcataaacaagggggccaatattctcttctttaaaggtgtaaaatttaaattccaatttctggcccattctcaacagaatttggtttctgcaagtgtcaagattgttcctaaaaagtcatcctcaaaggacagggacagagtcttactataaaatttcctggtttttgtttaaatgaccgatcaagatttgtcattcatggatttacattgactcgaactttgtttctcctcataatgaaggtgctgaaggtacaaagctgagggtytaatgacaggaaktactctggtaattgtaaggaagaagatttatcctggtcctgagaaaaatgtaagtgacataatggtcgaagcttcagagagtagagatattttacccatgattataaataaatcctgactgaaatctgttgacgtgatgttaaattatgattctgagaagacaagcctagagggaccagaataatacagtccaggcatatagttttcggatgagctcaccatttatggggacaaagcttggaatatcttgagaaatgaaagttaatatatcctttattagacaatctttctggtctatcagttttctcactggacttttgatgacagctatatggcaaacaatctaacactgaggtcattctgaagtgcaggtattcttcattgttgacgggaagatatccatatactccgggtatcagaagacagagatagtttagttgtggttatttaagagccagacttatatttttccactagtcttcaggttttttgataaccacagtctgtatctgattccacttgcagctctgacactcagcatggtgtctagattagaggggtcattttgtacacataagagtggtcttaaactcattaatgcagggtgatgataccgcatatgccagtgatgaactcattaagaattctagggccaagcttggtggctcatgcctgtaattccagcactttgggaggctgaggcgggcagatcacttgaggccaggagttcaagaccagcctggccaacatggcgaaacgctgtctctactaaaaatayaaaaattagccaggtgtggtgatgcatgtctgtaatcccagctactcaggctgctgaggcaygagaatagtttgaacccaggaggtcaagggtgcagtgagccaagatggtgccactgcactccagcctggatgacagagtgagactccgtttcaaaaaaaaaaaaaagaaaaaaaaagaattcgacttatgtgctatcccatttttgaggaactagggatgataaacattacaacttattttgaagtgacatcttgaaattttcttaaaaagttctgggacagtattactgcaaacctaataagtaaatcaactcctgatattccagtgatacctttaattgtactttgtgctgtaaaatcagaaatgctatttccagaatgttaggttttctggccagaacaaaccacatcacaccattgagcaacactttcgctttgtctgtgttgctatggcttgtattattagttgacatgtaaggcagccaatattttttctggtttaagagacattaggttatctcttcacttggctctatatgggcaaattgattgagactatcactagaggcaatgaaaaaatataacataggccttttatcctggaactaagatatccaggttttcttttccattggaaactatcttcttttggggtatttgtttttttcaaaaagaggataattatttgctattaagcttagtaagagtgaattctctgatttttcaaaataatatgtggccacttagatgaagaaaatagttgatctacttgggctaaggtgattgtacattttttaaatcaaaatatgttcttcatataagaaagatttcagaaacagtgattttttcctatagacattgttcttaggatagttagatagtyggtggttatctgtagaatatttttaatagataggtactagaaatgtatctcccaactttattgtactgttggcaaaggaggtgaatcagatgacctaatattttacagatttgttttccccagaagttttaaacttggattggggaagcacaaagattcatggcagcttgcctgcattaactttatagtattgaaattgaaatgatagaaaggtggagcttagaattaaaaaaggaatattggttcacacctgtaatctcagcactttgggaggttgaggcgggaaaatcacttgaagccaggagttcaagaccagccttggcaacaaagtgagacctcccctgcccactgcccctcaagggaatgttataaatacatgaagatattgatagcaaagctgggaatgggctctcagtttgtagtggatgttttgctgtgccacccacatccccccttaggactgcagaacatattttcccagctgtcaggagtgctgcccacatataaccttcagctggcagycctctctgggaattgcccttggctgacgagagtgttttccttaaggacactcctcctttctggggtcatcctgcatccaatgactgaatcatgccatggtataaagtcctggtccccttgatcctattgtaaaggcctgttccagctccagagctccagagctctccgtggtcttggctgtggctttcattgtggctacatcaacagcccaactgctccctctgtccagcagtgcttctttcctctcttacaggtgttaatcccaagagaacttgccaatcaacctcttatacataaagctccctctaaatctactacccaggaatccaacctagaccaatagctctgttttctccatggtcaatctaagatagttcctctagctttcataagggagaacagatggaattgtctttctttgaaatcattttcttctgaattcctgtgtcttcataatctatagccatctattcacagaatcctactaagaatctacagaagatagagtcttaggaggctcatttgggcaagggtttcagtttaggaaaatgatgaaagagaatacatttcctgtaaaacattcagcaggcttattgttcaggtaaaacttagtgagttgatcattttgttttcaaaataggaagactaaattgtgtgtctatttctgcatctgaataatgcacaataggatttatataaattaggcagggcatctgtaagattgattactttttctcagcaaattgttaaactaaattctccatgctatagcactacatctttcatcatctcttattttcaccctcctccctggcaaaattggtgagagagcatcttcagcagctgaccagagacctccctgtgtgattttgcctcagcataagcattttgctaagaagaatggaggaaaaagggaaacatctgcattctttaaaataaatagattccaaagatatgagcgttatgttcattctcaacgtagtgagatcctgttcaccagtctgttattaggggattagggccaagctgtatgttttcctctagcgcagctctgatggtactgggattgaaaagaaccagaaactgctgctgtccactgagtgtttgtgtcaggggatcatgattgcaagctgtctttggatcaactggttttaaatgctgggagtgtgcactgttgccatgattgggtcctttcagctccttagggtccaatctttttctatataggtaatacataattactctgggaaataaaaagcaacaataaatatagatgtattaagagcatgggctttgtagccagacaaacttgggttctggtcccagacctgccacttatatgtgaccttggccaagttttcttctattacttctttctgcttctattcttcttttcagttggccattaaaatactaatatgtgtaatgccaaataatttaaacagtacaaaagaacgtaaaatggaaacgaagtctctcttccatcccaatttccctcttcattttctttctctattgtcaaccacagtagttycttgtgtatctttcaagaaattttctatgcctataaaaatgtataatatatcctacatgcacttacttctttttacatttcctaataatgtaacttacagcatatttcatattagcacatatagacctaccttatccttttcagtggctgcactatattccattgagtgaatgaaccatgattaagtaagtgtttcattgtacatctatctaattcctattgatggacattttcgtggcttctaatcaatttctgctacaaataatgctgcaataaatatcctggtacattcatatttgagtacctgtaggatcagttttcaaagtgtgtggtcatttaaacttttgatagatactgcaaaataaggcaaagatctcaatttctatgaacctcagtgtcctattctgtaaaatggaagtcaaaacaatacctatctctagggctgttgtgaggattaaatgagataagatacatgaatagtgttgccagatgtagcaaattaaaatataagactctatttaaatttggatttcagataaacaataataatgtttttgtataaatgtgtcccaaatatttcatggaatatatactaaaaataatttgttgtttatctgaaattcaaatttaattgaggtgttatttattttatttggcgctctatacatgaagggatcagtacagtccctggaatgcagtaagcactaaataaacatgggatgctataattcttattagacattcaggcaaatgctatcattcagcaaatgtttttggaaataatgattctatactccttaatttatttatcattcattcactgcatacttactgagtgcctgctgtgaactaggtattattctaagtcctcaggatggagtggtgaacaaaaaaagtgtatgagcaagggaatacttttgagtgttataaggctgacatgtacttgagattaaagaagaaaccaagctcagggttaagtggattgattggttaattggggaggtcaattatattgacctttattatctactctctctagtaccccaacacttctgtagcttgtgaggaaatccccttttcaggaatccatgttgctggtgggaaatcaggagcattagaacatggaaaggatgaccttgatgaacccattgaaaatcccctcttttgtttctcaagctttagcaatgcacttgcaatattgcttccaaaagtgttccttaaggtcaacacttgattttcagcttctgaaagcaatagtctagtgacrtggagcatgataggtgctacctcactctcagacttgcattttctcaaggagattttcagtgaagtctagcagctcttagtatgctatgcctcatcaggaagaagcaggttcagaccagtttatcaaaaattattagttgcagttgctatctcttacctccttttcttagaactcagagttctgagagtagatatatagtggcatatttttaaaaaatttgcttcaaataattctagttgctgttctgtggcagttaaactccgtatgttttatggtgcctttggaatctaaattttatgaattttttacttggattttggcttatttagcaattgacttgtgagtttgctaaggtaaaggctatcttattatcccatatgtatttaaaaaaacggattctaagaagcattaactagattatgtcagagttttatactctgaaataattatatgatgctgaaaattgagccacattttaaaatcttataacttctcctttcttttcagaatattcatatactgcaattcatctacaggagttttcaccttttgacaatggcaaaagcaaagtttgaaggtgctgagtctgtggagccagtgtcaccttcacagcccaaaaggccatcctatgtccccctagaagagctatggtgcaagattgctttaaacatgaaccctgagaacagctgcatcacacatgtagagccagggagtgtctgctttcatgtttcaagttggtgacaaaacccaatcaccatacaagctaaaattttagamgtctagaaatattttgaagatgagttttaaagcaaatcattttgtctgaccctccagttctgctgggattttttttatgtattattgtcagtggtggtggttgtaggtaggacaagaaaaatgattggattcaaaatatagattatttaaatttgtttataggtctttatcagtttatgcttattcagcaagtttgggtacttctgttgctatgatccttagtgctcattagatgtatctctgagttcctagttaagtgcagttatatatattaatatttgctaagacagaataggggataatgtaaaaactcctctgattgtattgtacccactgattgttctacagggatatattcaaatcagaggttaagcaaggcatctcacacagactatggtttaccaatatctccaggctctttttctgtaaactctagttacatttgtagagtgttattttctcctctttaaaataacctattttgtgcttctttttcttactcttcgttcagtttctgataactttgtcaaatcataagacaatttcctctcatggtcttactttgtgagggctgtgctttcttcttgttagggttctgtccacaaacctgaaaagtgtgtccaattgtccattgtaaaggttattgatgaagtagtttggattgtgctaggctcggcgtcaacatccagaactactgcctactgtttcttgtataatccttcctagagcttgtgctatacaagttggaagaataagagtttggaaataagacgcaatatcatcttgacttcttcctgagacaggtgcactttcagtagagacttcaaggcaatttggtagcagtgcagtttccaaaaatgacacaatagccttctctgtccactcatgcccattttttctaagatgctgtttgctgagaagtgtcactaaggtgccagaggaggtgtctctaggagaaattaaccagcacataattcatacctgtaaagataaatgagatttagaaggcttcctaggttcttctattgttgtcaaactagttaaagttcagaaaagtgtagcactggaaaaatgattgaattctggctagagatgaaaatactgcaattgaaaaatttccagaacaacgtgtacttggatctgtattaaagaaaaattatttgagtgtttaagccaaatgatccagcagagttgatagtgtgaggcatatttcacagtcgaataaatatttaaaactattttccagcctataaaacaagtaaattaggttattttttttaaagtacaatgaaattaacctgtccacctcaacttgttgggcaaacctgctctactcatcccaaccttttctcttagaagggaatctctgagaaagaaatgtgatgaaaacttccaagttggaaaacaaagctggtttacatttcagggaatttcagaaggaatgattagcatcatggtatactggcccaggtggtctgcatccagagggcctgtctggttttggacagccctgactaacttgtcatcaggggccaaattcaatggacacaatagcttttcataataaacccctttgaactgggtggagggtggtcttggggctccatcatatacatgacctgcacagaaagcagtgcagtaggttgactgtgttgttctctattctgagctgctgtcctgttagaataccaccaagcctgtccttcagcctcagtgctggtttgtaggtagtccttctcattcagtcttccaaggcttcttttatcatgctttgttgttcttgtcctttccagagtttaacatatttttccttttacttgcattttagttattgctctaccttgccactgtctcctttgcttttttgcctccagttaaatagacttctgaggcaatggcaatgatgtttctgtatttatcaatcgagttggaaaagaatgtcagtgactaaaatttattgagatttcatagctgctgcataaagctggcaccataggtggtggaaagagtgctcagccaagagtttagcatttgagtttagcccaggagtacccctaactcactgggtatctttgaccaatcacttaacctctctgggcctttgttcccgtgttaatgtaagaccattttgaattaacatactaggaaagtcttgcctgcttcctctgttatatgatgctacattgtgaatacattcccttggttatactttcaattcttcattcttgaagaaaattaattttatttttgtttttagactgcagaatgaaaaatggatgaatgtcaaagtgggagacatcattaaattagaaaataaccaatttgttgctgtaagtattcaatattgtttgaataatttatctcagattaaagtagcatatatatggaagtatttacatttgcaaatttagtaaatccttactaatccagaataattatcatcagtatgtattagtaaaaagtctcaattataaaatattttaaaagacgttgatttattagtttcaataacttggcaactcacataaggttgaatgagtatcaccttgtccatttccctagagatcttttaaattaataggaacaaaagattttacattagccaatatttgatgtaaataagagttttaaaaatgctcctgagtactttaaaaagtctgctctcacatattttgtgattagtactgttaatatcctgattagtattgttaatttacagtatatttgaaaaaaaataagctagagaaagagaaaagatatgtttcttccttaaaaattagaaaatgtgtattgattgtgctgaattaataacatgttattaatgagagtttactttatcaagtatattataatttatatactcaaatggcctatgttataatttccttaataaaattcaagggattagtctaatcactaaaatatatgcaactaactatagttcaaattaaatttaaggtaacaaaagttattgagatcagagattaaaaaattcaagttattgtattgtttctgtcaaatatatattagattacatatgaaattttttgtgttgagtgctattttgtgtatcaagttgagacattttaccacagggaaaaaaatatggccccaagagttatttacaagaataacaactcagttaagagtcctaaacattcactttcagaaacagtcttctttcattaatgcaccatctgtgtatactgaattctccagaacaacccacactaaggagactactcagtagacaggccattcacaaaagagttcacactttcagtagagaagtgcttatttctctggtaaccacaatgctttggaaaatagctgggagccaaaaataaacacaaaggtgtcggcagccaaaacagaggtctcaaagtccactctggttaagctccttataagtagaacagtttgccaggttctcactcgcaatctatttacttttatttaagccacaatttaaatttgcttgtccatcttatttttcagctcattaaagattaggaataataccctggaaggtggtgtctgttagaacatactctgtgcgtggaatcaaggtagctccagtgtaagggcactagatggggaactgggagagaactgagactttgcttcattctttcagtgacagtaaagactttatcttctttgtctttggtttgtccatgtgtcaaataagatgctagaccactacaggatctcaaaaatccrttccatgctgtgattctcttctaagctgacactagactatacgattcttgcaggcaaagcacctattgatttgcctgttctccaacacttggtgccatgttccatcaacaggggcatttggtaaatgttagctgaataattaagtgttgatctttgtaagaaagaagacaggaaaaaaaagaaaagtagatataaatttacaaaaattcagatgttctggatcaataggataccagtaaacagtatctgccctaattaaagatcacatatattcagggttctttgtctaagaagaaagggctccaggcaactcattcgagttctactctcaattaaaatgattacagtgaaagagttttggtgcttctaagtggataaccttaacttataaaaaagggacgtgtggaattctaagatgtgtgcattcaaatgtttttggcaatgacttcagctagatagtgtcagattattgaagaattagcataaactgatatatgccacacacttaactatcattttatttggaatagaatatttcaggggcaatgctaggtttgtttttacttcaggtattcagtaaaaacaatgagtgttaggagccccatgaacgtgctctaacaagggtgaacatcagactggactcacttgtttactaacgccatagtgtgctgatttatcacatttttaggagtgggtccagaaaagcagcagtcaaatctatgtctcaaagcttttaactctatggtgcctcatggccagcagatctaggctccaattggccatctagcctttatatttgaatttgtgttttctttggtctttgtttttaatttggttatattttctatattatggtatgtgtgcttacttgctattgcaaaagcttcaatgaagtgaaatacagaaggcaagcacaagtgcaattgaagagcagaattttgaattttaattaatttagatttaaatagctacatgtgatttgtggctactgtattagacacacggatgtggccttttatggtggttcccatgatggsgtgagaatgcttattttccactcttcctcttgttatcgtttggagggacagcaccaaaataacactctaagtgtctttcatccagttgctcacgcctctctcctaggagtgtcttctctgattggtgagtttgggagctgggagtggcgccacatgacctaggtgatgcttccttaattcttgttctctttgagctgcacctgtgtgcagagagtctgttctgctctgctcttccacgctatcaattttatagaagcaaatccctgtggtgggggtattgggagggccagggcaacttagagcttccagcatctgtggctcaatgagtttgtctaacaggagtgaagcccatttgggccacagacctgaagcctggtctttatcagtaataacagctttatcaaaaaaagatatttttatctccattgttctctgtttgactcctacaaatgtagttctgttggcctaatctttggataaccgaggatgggagtccttcaaatccacctcactgaacctcttgattaggtaattttgttcaaagtttttccatgtctatctactcagcacctacaaaaccattttcaagggcaagacaattttttttttggtgaaccattggaatcacttaggagtactaatatatctccctgcactctggtatcagctggcaggggcttcagagagcttatattcggggggcaaaacttacaggcccctgaaagagacccacttaggagttatactgaggtagatttgggggaaaccaggtcatgaaggtcatgaaaacaattgctagcatttattggccatacgccacatgccagacaatattaacaagcacttcatgtgattagctcatttaatcctcacattagcccagtaagggcaggttatgtagtatccttactgctctcactttacagatgagaaaacagaggcacagtgccgtcaaacagctcgccaatgggacattcaggagttaagtctatgcaatgtagctcaagtgcctccacttctaaccactaccatttgctgttccttactccattggaacagtcatcctcattgacttgagtctgggctaccagagttaggggctcttggcttggatgctggaagccaagtgatcagaaaatatgttgtgcccagtgcagatgcataacttctagctgttcgaacttagaatttgcaacctgatttatgtcagtttatcagtaaattttaagcaaggaaaaaagctcaccggagattgccaattagctggcatattcagaagttacttaccttttatttatttttatttatttattttttttatgttctgcatttgtatgtacattttaaaattcaagaatacttgtgggctgaattgccagaattcctagttttttggaaggaccaggaaaaatgcagagtataattcagataccacaaggagtctgacttgcattagaagaaccaaataaattttgttagaaaaacatactgcagagttcctgataccaccggaactcggaccgtgggagccaggtgtacctttctccttcactggacagcagtactcttgtgttgtttcacttttcttagctgatggtagaaataaaatccttacttggcatgagcatatttgaacattactagaattgagttgtttagcttgtttgaaaagtccttcctttcccttcacaaaaaggcattcatagaattgttgttttaaaaccaaggcattcttctgatagaggaattgacaattttattcttcggaaatgatagggctagaatgattaatttgacctaaactccaggcgtgactggggtgggcttttgctctttcttgactcatcagggaatttcatctgttctttttcaacacctatcttggacacacttccagagaggcctttttttttttttttttttttggtggtctcattgccctcattgctcttttaagttttataacttcacgtcagagttgcttgttgttccaacctatttgctgtaagtaaaccatctctatctttctatctctttctgtctctctctctgatatatatctatttgtcatatttatatgacagtagaaagtgggggtaaaatattcaggcaaggattttttttttttttgactagaggaacagcctgcctgttaataaattttatgatgtccattattattctcagccttccttctcttctttgtcaccatctttttcttattcttctcaaatcactgtaattagaaaaacaatgatgtatcccgtacatattagtaatcaatatgcatttattggacctgaaatttaaattttaaatacaaacgttacctattaccatataaacttcatttttaggatctcattctcattttttgactcaatgcatgaggtatttggtttatttttatttttagattaaaataaaagataatgttgtagatgatagagaagatgaagaactctrtgtgagaatggcctaaaaaataaaaggcgatccaaaagtgttcaacttaattctacaaatttatctttccatcaggtcatggagccacaatccaaatattctttcaccattgtagttttgatttttgaacaccaacaaagcaaaacaaaacataaaacaaagtgaaatactttctgtttttcgtagttgtgttccagtgatttagtagcccaccagaggaaaagagcatacattttgggatcagaagttctaaattctaattccagctctgcaatttaagctatgagtgtccatgaggattgtgttaagtctcttgggcccttgggttcctcaatgactttggaagggccatgggctttacatgagttaatttagttcttctggtgggtgtggtagagtctattcctccctcactcctgggccagatatgacctcctgggttcctcatccatacaatgggaataatactactcactcacagggttgtgaagagagtaaaacgacacaattatgagagagggttttataaatccttaaagaattgtacagctttagggtgttatcattgctttacattttactttattctttaactcaacaaatatttattatgcctaataaccctatgaggacaatgtctttggctctgaggacccaaatatgttcagtgcattcttttcagattccttctgatgggaatatttgttttctgttgcccatggaagttggggaaggggcgttgtgttggaaaacactggttccttcatgaagaacatagcagagcctctcctggcagagcaaggagaaaaggcatgaataattcacaaaagaaagtaaatatggggcatatgataggtggttctgatcagaattaatgatatcctggcccacttgtgagtttggatattcacgcttttcctttcctcttctttactcctgctagtcattctgccttggggacttcctttcactgcatctagaatattccatgatgcccttcctcaactaccaacccaacgttgcactctcatttgcactcctttcatagcactttgttaatgaggctcttagaaaccttatattctgcctttattaaactatacaaatccttgaagcaaagagatttttactcattttggtatcccttgcagtatatgcctcatactgtatgcccagattcaaatcctggctcctacccttactgtgtaaccttgaggaagttacagaagccctctgggccttactttgctcatctgtaaagtggagataacaataagacctgcgttacaggatttctgtgaatgttaaataaaatagcgcatgtgaagctcttaggatggtgctggacacatagtaaaccctaactaaatatcagctacgttatttggaatcataaacacctacacctggaacacaagtttctggatcaactaggaattgggtccccgtaggatttactggatgagtcagcttgaggaggcctgttgtgagactcagagtcctggggaaagtgggccccaaaattcatgggttgctccactcctggcacagcacttctggcaaacgggtgacaagggatgagcagggctttttctgcagctctcctgccctttccttttcagaattatgactgagggcactagaaaataggcctgcctgcatgacaatgagcgcattgaccgcttatcctcccggccccgctgggccttcccttcgcactccctcctcaaccacaatgaattaacgccttgaaggacgaggttaacaaaagggaacagcaggcctcagcagagggacagggagaagggaggatggatgaagggagtgcagcaaggccatcaaggagtaggaaagcaggaggaaggttcagagaacatcaaagaaaaagctggtaactggggagatgggcggaggtggggaaggtaggcgtcttggtcctggagagtacagtgagcaagaacagttagcccggaacctatgggggtcagcctgtgggaagctgggtcactgctcaggagagaatctgaccgccagatggcagtggcgcctcagtcacatgttcctagccagctgtgtgcagggactccaccccttgtttaccatggtgtgagtgtcagtgcagccccacccagtcttcaacagtaacactggattcgagtttcaaagaaaagcagccctgggtacaaataggcatctttctctatattcaatcacagattcttaggattagagaattttggattttgtttaacatgagccttttaagcccaggggaggagaggtgcaggcccatagactgactgttaagctctattgctgtttagtgccttgtgcctggttttatgcattgaaatttgaatgtgggaaataagatcaaggtgaattttcaaaaaaawwttttttttcctttaaaatcaggrtgggtagtttttggcccaagagcggcatcactttctttatgtggctttcctctgttcacagtgtgacaagtcagagaatttctgcctcaacaagcttctgtggctctttgattcagagttgtgtaagagccttgctaatgcaaacccacttattcttttaggggccgtcacagggtatttttccccagctctgttttatcccagtttagacaaaaccacacacacacacacacacacacacacacacacacacatgcacaccctatttttgagttgcaaatttaaaagcttgagacaatcaagaaagtaagttgattctaaatttaacccccaagattcaagaacaaagcaattctaatgtttttaaaaataaaggtaagaaaatatcacagatttggaatgccaatcatacattcagacatagctagaaaattgttaggctaatgtctcaaactaaattgctaaaatttaagccaattctttttagacattcagacccttcaaaattttataaaaacacttatttttaaaataagtttagagctttgaaataaaatcaataagcactttgccaatttagagagctaccaggatgctaaaactgaattgtgataggtgatatgcaaagctcaattggacatcagaatagaactgtttatctctgaaaaatccaaactactcagtatctgattttttcccactgcctttgactacattttctcttctgtcttgctgttttccttagtccctactttatcttagctctcctctttcttactccctaccatcttttacttttttctttccatctttatctctttcttaacttccttgcccctcttatttttattttattttttcagtttcctccatctatttcccttctgtcttttccccatctcctttgcctgctccctgcttttaactgatgacactaggtaattaaagtttgtgcatatatttccaattatttattggagagagttttatgttagtaattatcaaagcaagaaaatagaatttatatgtttcattaaaaaaaggtgaatcaagtggctattaattcatatgatagctcctttccttgcttatgttgtgatagtcaaggggcatataaaggaggaacagggaagagggagggtttggttcagggcatatgacatagaggtagaacaggatctcacttcttttactctgtttctgaggctctgttgcctctttagtagtcaagaggtgatatactgtagaagactttcaaccaatctaacttctcaagtattcttttgttatgatttttgaaaataggctgatttacttctcctatcaagtagtgagccacatggtctctgttatgttgaaactgctgagcttgatgggtaagttattaaaattagaataatttggttggtttttaatttatttaaaagtaatgtctttagagataagacttaaccttgttcagtatcttcttgggagacataggagtttacattgcaaagtccatagttaattactctacagtaattttgaaactgttttttctcttaaatttattttcttgcagaaacagtgagcgaaacttatatacaggaataactttacacagagaatcttcagtaagattccttagattttttaaaaaaagtttttgcttgttttgatttcaagtgattttatagggaaaatgagaggggtagagatcaagattccttgaggagggaaggaaggactgatgttactttaaaaggcaaccttttggaactgtgtcaaatgaagacatagaaaaagaagagagaaacagaatatgatgcagttttgatgttgatattaatttagaatttagttatagaccatatagcagttctgtttcagaggatttagtttgtctggcataaaaacatttattgaatgcttacattttaatgacactatgtatttgtgttctttagatggaatttatcatttaatcctgatgtaggtgctatgtaattatgccctattgtacagacaatgaaatcaaggcttagagagcctaggtaatttgtccaaagcatctgaagagtgaagccaggactcgaacctggcagtctgacaccagagtccatggttttaactggtgccttccaaattattgtcatattgagctattcaaatagtactttagtctgtgggaccctactttggacagaacagttcagacacaactaaaacagttctgagaggaacatttatggcatacatttgaaaagagaaaaattctcaaataaataatctcatcattcatctaaaaaccctagaaaacagcaaaataaaccccaaagaagcataagaaaggrgataataagataagagcagaaataaatagacttgaaaacaaaaaaaataaagaaaatcaacgacacagagctagttctttggaaacatcaatacaagtgacaaacctctaagaatactgataaaagaaaaaaaaagagaagacacaaattagcatattatgcatgaaccatggaaatttggtatagatcctgaagacattataaaggtaaaaaagaaatactacaaacaactgtgcacacataaatttgacaatttagaagaaatggaccactttctcaaaaaaaagactatacacttaatatgaaatagataatttgaatagctctataagtattacagaaattgatttcaaatgtaaagtataaaaagctttgaggaaaaaaataggaggaaatctttgaaatctagggctgtctggtcagattcttagacttgacacagtaaacataatccataaaaggaaaactttgataaactggacttcaagaaattaaaaatttttgttccacagaagttcctgttaggaggacttaaagataagttacagactggaagaaaatatttgtaaaccatctatttgaccagggacttgtatcttgaatatattttaaaaaaacttcttaaaactcaatagtaaaaaaacaaaccatcccatttgaaaatgggcaaatgacataaaagagacatttcaccaaagaggacgtacaaatggcaaataagcacatgaaaagatgctcaacatcattaactactgaggaaatacaagctaaaactacaataagatctcactacagacctatcagaatggctaaaatgaaaaagagtgacaactccaaatgctagcaaggaagtagggaaacaggattattcatacattgtgggtgggaatgtaacatgctacaatcactctggaaaatggttttgtagtttcttaaaaactgaacatgcagttaacatacaacccaacaatttcacccctgggcatttatcccagagaaatgaagacatgtttgtacaaaaacctgtacatgaatgtttatggtggctttatwcataacatccagaaatgaaaacaacttgaatatccttcaataagtcaatggttgaataaattgtggtacatccataccatggaatactacttagcaatgaaaatgagtgaactactgatacatgtaacactctggatgaatcttcagagaattatactgacaaaaaatagccaatcccaaaggtcacatacagtataattctgtttataaaatttttgccttttgaaaaggcaaaatcatggaaatagagaacagattagtagtttccaggtgttaagatggggtgggaaaggcagggaggtgggtacggctatggagcacaacctgagggatcccgcagtgatagaagtgttctgtatcttaactatttcaatatcaatatcgtggttgtgatattatactatattttgcaagatgtgaaactgtagtaagatgcaattctgaataaggggtacacagcatcttttggtattgtttcttatgctgaaaatcactttgaagtttatcaagatactcaggcagattaagcaagagtgtggaatgacaatgaaggcattaatcaggagtcctggaaaatactttttttwaaatttcattttattattattatactttaagttttagggtacatgtgcacaatgtgcaggttagttacatatgtatacatgtgccatgctggtgtgctgcacccattaactcgtcatttagcattaggtatatctcctaaagctatccctccgccctccccccaccccacaacagtccccagagtgtgatgttccccttcctgtgtccatgtgttctcattgttcagttcccacctatgagtgagaatatgcggtgtttggttttttgttcttgcgatagtttactgagaatgatgatttccaatttcatccatgtccctacaaaggacatgaactcatcattttttttggctgcatagtattccatggtgtatatgtgccacattttcttaatccaatctatcattgttggacatttgggttggttccaagtctttgctattgtgaatagtgccacaataaacatatgtgtgcatgtgtctttatagcagcatgatttatctacaactatctgatawttgacaaacctgagaaaaacaagcaatggggaaaggattccctatttaataaatggtgctgggaaaactggctagccatatgtagaaagctgaaactggatcccttccttacaccttatacaaaaattaattcaagatggattaaagacttaaacgttagacctaaaaccataaaaaccctagaagaaaacctaagcattaccattcaggacataggcatgggcaaggacttcatgtctaaaacaccaagagcaatggcaacaaaagccaaaattgacaaatgggatctaattaaactaaagagcttctgcacagcaaaagaaactaacatcagagtgaacaggcaactacaaaatgggagacaattttcacaacctactcatctgacaaagggctaatatccagaatctacaatgaactcaaacaaatttacaagaaaaaaacaaacaacctcatcaaaaagtgggtgaaggacatgaacagacacttctcaaaagaagacatttatgcagccaaaaaacacgtgaaaaaatgctcaccatcactggccatcagagaaatgcaaatctaaactacaatgagataccgtctcacgccagttagaatggcaatcattaaaaagtcaggaaacaacaggtgctggagaggatgtggagaaataggaacacttttacactgttggtgggactgtaaactagttcaacccttgtggaagtcagtgtggcgattcctcagggatctagaactagaaataccatttgactcagccatcccattactgggtatatacccaaaggaaaatactttttaaaagtatcaagaaggcctgtgtgtgattattcttcctcttttgttttttcacatttgaagrtagaactgagatagtggagaggatcctgaggaagtaattcaaaatgatgataaactttgataaatyacatgacgtagattagggctaaagaactagggctatctggcttttttggtgtgactatttcagttatttgaacagttgtttaaatggatggacatgttggccctttagcctctataccacttttctcactcttgtccgtcaagcccagctcaatttctgcttcatctatgaagttcttgactatctcaattcctactcatctctgcgtcctagaaatcagcaggttttgattaataagattacttttaagcaaactagcttgaattatacatccaacttagtctttcctgaagaaagctattttagcaatgcgtattccttgagttggactcatattgtcctacatcattgtgaaattcatttacggaaggttaagattggatgccttcttaggtacctgctttttggctgtctaaaatgagttatttcacgggtttgcacaaaattccacacagtgatgtttgcttttttacctaccacttgttttccccaagaggattgtcatcctcttggggcagcattgcgtatcttgggtgactagggtatgtatttaatcaatatttgttgactgaaggaaagtaccactaaacatttccataaaagatagaactctgatagctgatcttaagctacagtataagagaattaggctgaattcagtgagaaaactgggatggcaagcccttaaaacaagacgtaagtgatggccatagaatcttaactgctggccatttatgaatatcagagagccatctgtccaaaatatgtgtggtctcacctataagaagatgcccaactcactgtgacttgctgagcttgtctaggttgtctattttagacttatgggtttcttggattgattctctaagaaaatgaaagctgtattccctttcccatttaaatttcagctactgtgaaattagtcatgaccattttttgcaagtaaaactcctatgtagatagtagactctggagtgatattagcctcctttatttggcaactgtgttccaattctgaatgtgttttgtaactcatgcgtgatgtctgagtaggttcaaatgaaaccatatttgttatgtcctctgttctttcaaactgcaaaacagatcattgtgttgttataaagatgtgccgtgggtagaatgccaactctttggagcccaagaagccctgcctactttcctgaaacagtgagcgaagtgtgaatgacattcaaaggagagtttcttggatctcttgggtttggctttgcatgtgctacacccacctgattgctttggtaggatgctgttgggctgttccatataaaaattcatgtcatgtcaataatttcacagggaaacgaacctaaaagtccgccatgcactatcagttacttcagaacttggagcagatatcagcagacttgcagggtttgatggtaagtattttaaacagataaacaaacaaaaacctcaaacccaaaaagcaatgcaacaaagtaatgtgagatccaatttatgtttctttttatttggtggaaggacatcaaattctccaggcatcaaagcctgtaatttcttcgcacgctaaaaagagtaaaaatgtttgccaaggagagaatggctttatcagtttatcgttcatttcatgcttgtttcctttttaaatatcatttacttcaatcccataataccctttacttgcttgatgttggcctccctgaagccatatacagacttgctggggagaaatattggccacccttgtatttctagttctaggtctaaccacccatccatttcctggctccataacaaagactaactaggagacctcaaacttcatgaagacagtcatcctgcctcatgtatttcagtaccttgcacggcgcttagcataatgtcttgaagatattaggtgttcaagaagaatattctgatttattaatcagttggtcatctgttgacttttattttagaccatggttttagtatttccatcttcataccattcagctggtccccratcttcagtataatctctcttgcctttccttttctacctatatctcgttctattctgttaaagttattcttaagtagtcatggaacaacctctagatgttgtccattctaaggatatctgcatgtatgattaagataccacagagaaacacagtacttcaagagtcaaaggaaagagacactgattgtaggattttaggcaccataataggctgcagagagaatctctggagtctccctttcactcctcagtggtctcctgctttacccacttgacagtctggcccagaatattagtatatccatacagattggctttatttactaatggattttcatgagtttgagacaatctttcaaaatgtgtttttgggggatccacttagggaaaacatggacaagggtattagcataatcacatgagttaaagcacaggcaagtttatattgtaaagtttctccagtgcagagcttagagctcctattgcctgtgctttgcaattgcttgtaaactctggattctgttaatattttaatctctcttaaatgagtgcttttataacagatgtttatagaaaaaaaaattcctccgaattgagattgaagtcagagagtagccaggaaactgaatggtccaagaaatattttgattagaataaaacaaattacacattttctactaagtaattttttcaatgaaattttactgttatgtgaatccaagaaaagtaaattgtgttcatgaatcaaaatacttgcttaaaatacctcattgaatattcatggaggcccaaaaaggccatctaaatataatttactattactcatttctttcccggcagaatttacctttatacctctattgatctacgaggaggtagaaattcatgatttttagtgttgctaatcatcaaaaagcagaacatgattgttagcaattatttaggtcccattctttcctagatgcttgctcagataggctacactatgatgcagttataaacagccctgcaatcttagtggcataaacacagtaaaggcttattcttgctcatgtcacattcttagtgggttgggtggccttctccatcatggagccacagtatctggactaatggcatctgagatcactgcactgggctaagggtaagatgaaagagacacaatggtttttaaattcttcttcctcttayagttcattggctaacattgtcacctggccctgacttaactgcaagggaggctaggaaataacaagtatgaatacttgttgagcattaactgtctctaccacacccttcaagaatcgtggccatgtaagttgatgccaggataatgcataaggagccaggctggattaggtggatttcttacatggaactgcaggactggggttaagcatccccctcttcagcatgactcctyacactctcaatccaccataccctgcttggctttttcttcttcttatagcacttagcactgtctggcatactggataattcatttattttttaagttaattatttattgtccatctttatctgcttcagtgtaagctacacagggatctttgttttattcactgatgtacgccaagcttctagaacaacgtctagcacatagtaggtactcagtaaatccctgctggatgaataaataaatagttacaaatcccattggggggccgagaggaagactagcgtcagggcccaaaaagacatgggagggcaaaggaaagtcctaacgtaaagagactgggaagagagtgtgaaacratggggtgaggaggaagctttagcttcctgaagtggccttgtaggaccaggaaggagtgctggatcctctcctcctggaaggcaggtgtctgggagagggatcagctggcatggtagtttttaaatgtctttacttcacatcctttctgaagtaagaaaatggaacacagtagctccaaatttaaaccaatacaagtgatgttgctcaggctgaaaacattttcctctcagatgaggtaacaggtcttgagaagttaaaggacttgcttatatataaaaatagccatttaaaaatacttcacaaaatttacttttaaggtgtgttaataattattacttactagatatgacttgaatttgcttcatacagaatgggcaactcaccaaatccccaatgaataattgttttcacaaataaagacaacacagacctctcttttttatgattatatatacttaaactgtggtcagcttttcagaaaacatgtaatgccagattcatgaggctggtacacttctgggctaaaatccaggtttctgttaagttactttttcattttaaaatcttgggctgcatttcaatctaccttaaagttcaaggcaacagggagttttatgggtttattctaataagtaaaaatataatttcctgtttctaagaaaacatcagaagaatgaatagacgaattaagggaaaataaattagaaacaatatacaaattagattccccccagttagcagccaaatttaaagaccaagaggatgatgcaaggtgcggcatggaagtctttgaaagagttaggacagttaataagccctaaatccttcccacgattgctcttgctttccttggccttcgattgttttctccatcacttctttccaagccctaatttacacatttcwattttaatatctctgacacacacacacacamtactatcagcacatggttttctaactactccatttcaccattcttctttcctttctttccttcctgtattcttgcttactgttctcatctcatcgtcttccttcacttctttttgttagctattttctccacctgcagtgtcacttttctgtcattctttatctttgtttttatcactctctccatattagtttaagtctgtttattaagtacctcctaagtacaagatgcaaaacaaagtatgtagaattataaatgatctctccatatattaccaaggttcttttgatcctttgctcctcgttctttttctactcccttttttgtgtcttctttattcaactttgtcctaatgaaatatcagtagatttcaggttttcctctggtgattggaaaaagactttcttgactcatgggaatcaaaactagatattgcatcctttagtttaaattaaaataggatatcaacattgtrtatrtttggcaatgccctggctagctttggcaaggtataatcgatgagaagatatgggaggcacactctttaccatgttctgtctgtgctaagtacatgttttaatttgtgacttctgggcaaatctgggtatggcattatttttgcttctggttactgtgtgttttcctcttctgagacttgccaaaatactttctctagcaccaaattacaattttctgtccttgaatcataaaagcacatcttccaagtatctaaagacctgaatttcccactcctatccccagagaagttcccactggggactccaggtttcggacacatagggtcagaactgagatgggttgaaatctcaggatgtctctggtaagtctctctgcctcctcacttttgcatctatattcaaagatagtgtctttctggtggacttatttctttcatccatacatacagtcacccattattcattcagcaaatgtatatttaacacaaggccaagggatttgttaagactgggatacagtggttaataagtcaggctcaggccttacttttatagagcttatttcccaggggagaagacagacttgaacaagggctcatccctaaagaagcctttgataaggtaaaggccctaaagttctcaggccctaaacatgatgytgatatgtgagcaagaactcactatgtaccaggcaccatgctgagtaattgcacacattatcttgttaaacccttacagctcttgaaggargagattattgttagctcaatttatggataaagagacccaggtaaattgattaactttcccagtgtcatatggctgttaagtggagaagccagactatgaaccctggacttctggcaaagcctattttacaaaggacacaaaaggacacaaaaccccaggttgtaaaccaaagtagaaagacagcattggagggttagggaaaattagcacaagagcttagctcttgattagggaaataaatgaaattttaaaatattctaaacccaaaggtacgaaattaattaccagagatcaagtccatccagcacaaggatgaggtcatcatatttttaaaacgtagcaatgttctcagtgattttgaatgtcaggatccctgataagagtttatagaagacttggccaaatgtagagaccagtgcacacaagagagttgggttttggcaggtaaatccatttatttgaaaagttctcatgaaaatatttttatacatttcaaacatcagaaaaaatgatttatggtctcttgaattttgtaagaaaagatacataacttgatctaatattatagatcaaatataatataaaaagagattgggccttgattttcatgttaaagtcttatgggaattgaaaagcttttataaacaagtaactgaaatacttgtcaattattattatgtaarctggacattcttattccttggggaaaaccccggatgtaaattgtcgaaatgtgtttaagaatcttttgcatattgttactgactgaactgagatctgttttctgcaactcctgacaagtttacatattttgtatgactgttaatgctgaattctgaaccgaggaaaggttgactctttattcaggaatccttgtatattttgtggttctttctaaagaatagcatgtgtgtaattaaaacatggaaaaataagcatctctttttggttaaaaaaaatagcttggttagcatcttgtgagtttttttgcttaccagatagctttcctattcacctggactggagcacaacccaacagcacagctgactcatgaggcatagattccatgtaaaggcgtgaagaataatttccctctttactgctggtgccgacatgccattatggtggtaatgatggatgggtgagccttgacagttgaagagtaaagaagctttagaaaataggaaggtgacatacttctttctaagaaaataagtatttgtcacaatcatcagggcaaacactagtgggcaatctctaaaacgctaaaaaaactcttggctagagaaattcttgaacagcaatattgatgttttatttgctggatgatttgtcttatggaagagttgcagtacagataatcaagaactatttctattaataatgtatakgaagagatgaagccagcttctctggaaaatcatagactattgggcactgagttccatttttatgataaactacagactttcactttgaggtaaatacttagctcgagaagtctgtcaagttggtaattaaccaacgatccagctgactaaatctagaatgcttaagaaggtccagaatgagatcctgtagatttttttcagtatgggtctagagcatttctgtgtgattgtcaaatggataaattgcaatctgctttcatgtcttctcttcagaggggcaaacagatatgaccagctagtttgattgtatttacacttcattattgacgtgattttcttccagctttattattgcccattaaagatgactttgtgctccaaacatgtattcagtaaatgactatgtgagaaatgatgcgattttttccttaactgtttcctcatcgattgtcaaactgatcatttactgcctctttctcttctctgattcaactagcaaaaagaagaagggtcctaagagagctttcccctcatccttgttatgcttcatggctaggctctcattttggttgcttctaatgcactttaatgctctcaccttttttcagtactctcagatctactcgactccctttagatttaggccaaactaagccccggctgttgtgcctgggctatttgattttctagtcctttattactatcatggaaatatacccactttttctgtttttcttagatctgctctaatatccatctcatctcttaacctctctcgaaatcatctgaaattttttctatccatctcttcgacaaagatcctattatgtagatagtataataggttataggaatacagaggtgaatacagtgctcccttcaaaggaatctgttcatcccttttcgaaagtggtacaaaagaaattgggaagtgtgtgttttatgctaatagagcttaaaaaggggaagccgagcacttctgatgataaaaacaaatgtagtttggctttgttcccaccattttgttttgactggggcctgtatttagaacttacatcaccgagaccacactctttgagaaaggctgaattggggcttagcctccaagaacccaggcagtaccccttggccttactccctgttcctgtctagaaccacacccttggtgtgaggtcagggaggggcaagccaacatgtttaaggctgtatttgcctccatgtcagtctttgcttatgacaatagaaatgatcaaatgaacctgttttttatattccttttggcagggactgcatatcatgttgtttttgcccaaagcacatttttttttttttaagtggctaggtttgaagcctgagaaattgagtcttgggtcaagaatctggaataaacttcaagcgttgctgtcaacctgttattttatgtagattttgctggtgatagccaattcaagattttacaattcagaatgaaaattattggtcaagaaaaaaagatactgaattcagggatttagaaaatgtctcctcatctacaacatagttgtccaaacaacttgagccagtttaaatcagttttaatttactttttactatcagtgataggctatcacggagctaaccagaattcagccccttcccttggcaaggttgtttgtcttatccaaatcctcctgccagcagtctctatttagcagtgggaaatagggatgtctgggaaactgccagtgagtgcctaagtggggaggcttcaggcagtacttttgttatattggggaaagacaggtggaggttggaaaagcagccctgaggacataagtccctcattcctttcacagttttatttgcttttgcttttttaatgcaaggtctgttagtgaaatggttggtcaggagtgacgtggycatgtggcaactggttgctgttacctctgtttagtagttttaaagggagcatcctagggagaaaggggacccccctaagaagcctcttttaagttcagaaggcagcttgaagagtggatggagtcagtgtaatatagaggatctctaggctgacgtggtcccctttctctttaatcagcgctaaagatacagtcccctttttattttccaaatgctatgttttatgttccaacttgctcttttgaattctgattaaatgtaaatgtatttttgtttgtttgtttttgagagagagaactttgtaggtactaatctcacccctgactctggctcaaaccctgattggatctacccacagcttcctttttcatatctcccctctcttttttccttcctccctctgtccctctctccctccattctgttctttcacgtctttgtactcattatatataaaaaatttaaccttacctgtttgcagtggatatgtatattaatctaatagttatgttttgtggcagggtccgtgaaagattatttgtggtttctttttctatctagagaaccctcatcctgaatgtatattttcatattgaaataatggaacgaattgattcgttgatttggagtgggcatgcccttggtttggaattaaagaaactagaaacatcttctagccagttaggggcaagttatatggtgcctttgagagtccccagaactctgaatctaatcaagataagaagcatagaacagctgaaaggaatcacacgcattctcagactcatgtggcaaacaaggcccaggtttctttctggtggaatacagtaggacctcagaaatcctgattgtgaggtcagaaagatggttaacttttgttgtgagactagaagtatgctattttaaactgtgtaaaagttcacatttagctaaaagagatggaataagagaaacttttaggacagtcactgctttatcttttcaaaaattatttgttacaaaccggaagtaaagatatgctttttttttcttttttaaggaaaaaatatcccatggctgttaaggtttctgttattatttgttttttctatttttatttggacagtacagaaaactgtgtttcaaaatagttgatggctttccatttttctacctcccagcttatttttttctagcacaattctttatatgtaaccccaggctgtctaaaggagagggaaacagtggtaaaacagtgctgtgggcttctgaagagaattttgggtgagtcataaagaggtttgttttgtttttttattttccagggattgttgtctgtgaggtgcctaacaacaagttagataaattcatgggaatcctttcttggaaagacagcaagcattccctcaacaatgagaagataatcctgagaggctgcatcctgagaaataccagctggtgttttggaatggttatttttgcaggtacagcatgtgacccaaggccagctctgtgggaacctttcctgcaacgtacaccagcacagtctatgattctctgtgttctgatgagcgcagtgctttcattccatgcaaagtcgtgctctggagttgacttaagattgtaggatgccaggagaaaacactattgctctgaaaatagtccaggtggcccctgctgtatgaggaactactgacatcttattcttaaggatgctggagctttaactagacagtgggtgctagatacctactgcttaatttttcttcattaaccccatcttaatcacctttgtcattttatgtatgaatctgcctttaaagtgggtaagagtatgaaagaaagctcctggctgtgcagttaattttgtagtttgcaaaggtcaagcagaccatttggaaaaggcttcttgatcctgtaatcatttctgtttatactccatagctttttccactgtttgtaaataggagagtgggttctggaaagactgtgcatgatgggggtgggtggggtgggaggaggtgcctcttactcttcttgcccaccaaatttcttttctctgctttatttctgtaggcccgaggtggccctctcttgctaagaaagcttacagtagcatcatttcataaagccactcaaattgtactcatggcttcaattgccagcccttgattttaaaagtcctgtttattgtgacaccaaattaagatgtgttttgggcctcttgactatgtgcaatcaaaattggaatgtttttcttaactgaccttcctcaacaacaacaaagtgttcattaaagtcttaaaagtgttccaaacctagaaacgttctcccaattcctctaaatactgtcagctgttggtgttagcagtgctcttgcygcttggggcattgccattgtaaagacttgggaaatccctagaaatgagccagtatatgsgcttttacattttagttggagaaataaacatatgatcatatatttcattacacagagaaaaagagagctaggcttgaccatgaacattcctttatcttcctacttaatgatagggaaatttcatggtcttctgatgggaaataccctcctgatttgcttcctgtcatcatagagatggaggtgcttcatcctatggatgggatatagtcccaaactttgcatttccgtgaccttgtttggaatggctaattcaggactctagttcagctacaacgtttcatgctagggcagttgttgtgaaccgctgagaggccaagttcttctttgtaaggtttctttgtgggaaaatgttctgaaaaacaaggaagttggttggtaagttgaataggtctccctccaaggaagtgtaacagaaagttcacagaatttggattgggcagacctgagtttggatttattattattttttatttattgttattattattttaccagctgtaggactgtaagctttggttacttaaacttcggaagctttactttttttctgctgtaacatggggataataatgagtacattagggtcattttaaaggctcagtgagataatgcatacggaaaaggatgcttgacaaatgctattttccttccttttctgcttcccttctttcaaatttaattcagagcacccagcctgctctctaggctgagagttggaaaaacttactgctctctggaccttggcagcaggcagcagggagagaggaacaccttcttcttttgtgatttggccacagtgttcacttgcaggagaccttatcaactggatgtttgtaaagcagagcatgcctgcattgactttagtctggtcacaaatgttagcagaaagcttaattagaatgctggcaaacagaagaattagtggttggcttcgtccgtgtcggagatgaacaaatggatgtcacaaaacctctaagtcttaagacatttagttggggaactagttccaggtgaacacctaggtctaatgaaaaatatctgctgggcgcggtggctcacgcctgtaatcccagcactttgggaggctgaggcgggtggatcacgaggtcaggagattgagaccatcctggctaacatggtgaaaccccatctctactaaaaatacaaaaaattagccaggcgtgttggcaggcgcctgtagtcccagctactcrggaggctgaggtaggagaatggcatgaacctgggaggtggagcttgtagtgagctgcgattgcaccactgcactccagcctgggtgacagaacgagactccatctcaaaaaaaaaaaaaatccaaaatgaattattaagtattctttctgtgttattactctagttatacctaccactaggaattgtgcaatgaatatagatgacacagatatgatttgctttacaaacctataatttatgaagttctaatatatattaacagctaggctacacctccctggtaatgccttctttatgctcaagagaggagaaaatcttgtttctgagggcaggaattatattcatttaaacagtctctaggagtctgtaccatcttgagtgcacactgcatttttgtcctagatgtcttctgtttgctctccagatttcctctcacctttttctaccattctttctgccctaggaggcttayttgtatggtttatactaataggttaccttgtacttctgcttctggttgggctttgtctcggggatccctaggaagagatcaaaaggaagaaggagattacgatcaaggtatttactcctccaggctgcattcttgtgtgctaacttcaggctggccagatctatcaacagaaggccactcttactctaagggctgcaaattcctgtcacctctttcccttagggtccagtagccattccttcccttcatcccttctggctcaggtggagaaacagcttgcttgctacatgcccttggttaatgcactaaccttttgtttcccctataatcccacctatgctttttgtaaagagttcttttataaataaaacttcctccaattctctttgttcaatgtgtcatctatttccttttaggatcctgaatgagacacagtcttaaatattggttgactatttcatatagttttagaaaatagtaaagaccaagaactttagaattacttatgtcgaggttcaaattctcgctctgacacttactaggtgagaaatctcaggcaagttcaattatttaaactcagtttcattattagtgaactgaggataatagtacctaatttgttagtttgttgtaagcattagctgagattataggtgaaatgtagatgttcaaaaaattaatttgcttaaaatacttacaaattatttattgaatgtctactatatgctgggcattatgctacttactcattggggattaaaaatgtgaacaaaaacaaatgcagtaccttcactcatatgattttcagtatggtaggagagagaaagaggcattaatctcaagccaaaatcatatcaatggccaaggccctgtggcaggagtaaggaaagtgaggtcaaaaaagaaggccagtatggggtatggagagcacagaggatagggatggatatgggactggagacatggataggggctagaccatgctggtagaccttgtggtcagtatccagaagtttggtctttatcctaagagcttagggacgccattgtaagttttcaaacaggtggggtgtatatgtgttaattgtgaaaagcttaatcttgccaacactgtttgtaatgtttgtaaatagacagcaggtcctggggttgggraggaggaaaaatattggttagttttgggggcagagtggatacagggagacaaagtttctaggttttcacagttgagaggtgatggtccctcagattaggaaaggagagggaagtagataaattcagaaggcttttagaaagtttagaaagttgaattgacaagctttgatgaccaggcttgaaggtgaggatgataaagttatcaactatgactgaggtttcttccaaccttcgcaactggatggatggtgatgatgctcactgagataagaagcttggaggaagattgtaagccagattggacaagggccacttgagaggccttagaagaatccaggtggaaatatacaggcaacaaaatacgtaggtttaaatatatagatttaaagctcagaggaacagcatgagctggggatacacatcttgtctatattattaaaactgttggtctcaaagctacggtcttaggtgagattgctcagggaaggtagattgagtaagaagataaggtgacctatgcctgagtcttaaggattctcagtctttagtagctgggtaaagggaagggagagtaagtatcatggaagacaggaagggagctaccaaagaggtaggaaggaaagcaggagaatattataacacagaagctaaaggaagagtatgtttcaaaaggatggaatagtcaacagtgtcaaaggttgctgaatagtcaagaagttatggaggatattgatgataacaccagatctgttttggcgttgtgattggcccagagactgggttgagtaacgagtgggagataagaaaacggaggctgttgagtgtagaaaattctttcaggatgtgcatataaacatttgtggttatatttacataaatgcttaataatccataaaaaggattccttattagtctgtgtgcatttgtgtgcctaatggaatgtacattttcagcacctaactggtcttttcatatttcagtttttagcaaccacaaactttatgtgtgtatgtgtgtgtgtgttttttttaagcctacagcaccaaatatccccagtctcccatctaagtactaaccaggcctgacctgcttagcttagcttctgagatcagatgrgatcaagtatgttcagggtgctatggctacagactatttggcctttgtgatctttaccataaaagaaatatttcccaccctcaatgttcatatgattttaataaatgattctgagaaaatgtgggtggtctatacacagcagtagctaggaataggatactgcagtacaatttccaacttaagacaatgaattgttatgaaacctcaattattgcttctttttttcttttacataaagaaaagtcttttaaggatgtgcctgtccttccctgacttctggagtggtatataattttgggtgtgcctcccttttctcctttctttaatttccccctttctcctatattaaatggctctatggattgaaaatcatgaggagaatatgtgaagaggaaacactggagaaattagctttaattaaaacttaattgyttctatttagcattttctctgtccacaaggaatttctttaacaatatttttcaatattcttatttgtttatcatctaataacccacktctaaagcagttgattatattcttagaattcctggaacaaggcacttatcatgggataatgtaattacctgaaataaatctaacacaacatttaagacagttcttgtctttacaaaaattacatattacatacgtgcagtatacaatacacaataaaggtttaaattacttgctgatgtattttggggggctattctagtttctccttcaaagggacctcaaatctttttgggaaacagatctagaatttgatttatttttccattttttaccttagtgttctgaattgtgtttgttgctgcattatttttaatatttccaaattattcctcacttttgttgactttgttatctttaactatgtcaaactagaagcatattcatgtatagacattgaaaaaatagcttcacttaaacctttcaactacaagttctgactgtatttatcctagtctaagaagatcacatctcttgcagcttccagkattgttgttaacctaattgttgagaatcatgtacaacttaatggcccttgctcttaataaaagttaaattattgtgaaaaatatatatttttttctttcagagacatttgatatgagcattaataagaatacataatcatatcatttcaaagttatttacttttttttgtttttgcaggtcctgacactaaactaatgcagaatagtggtaagacaaagtttaaaaggacaagcattgatagattgatgaatactctagtactatgggtaagttacaaaactaggcaatatcactagtcattgttatcttagtacatttactgaatcttgctgggaattctttaagaagcctacattctccttgtggagtttgtttttggggattttgcatttgaggctcagttatactgccttctattttctagattatgctaatttctcaaccagtggtagaatttatcatgagaggtaggttagtgtttatggaggtattcatggtcttacaaattccccatatcccagggatttgtttttggaaaaccaaacatagtttttaaggcagtttggtgtttttgttttcttactttttttcagatcctgtatacatagcttatggtgggcagggctggcttcacgggtgtgtgatctgtgtaaccacacagggccccacactcagagggccttatgtttggtttattcaacttctgttgccatctagaaattcttaatacttttagracagaaggtcccacgttttcattttgcactgaaccctgcaaattatgtaggtggttctggttataaatcctttgagccccacctcacagttctcctccctcacagaggcttctaacatccttagctcatgactatctttctcttatgaattttttttttacttctgattcttttgaaatgatattctctactactcgtttaccaaaaacattcagatattccttacattccatccttttgtcagttaatcctgtgctacctcatactattgatatactatctagtctttgtgtaatactgctttgtctgcttatataggggtaaagttcgaagacagccactttaaaatataaagactgtgacttcaaaccatgttttcccatgtaccctatcacaggctcacaatcataaagaatctgagctcaatatgtatttgcttacctgatatgtaacaattggactctgaataaggaaagaaggtaattagcaattgctgtgcacaaaatattggccaggctctgtgttttactttcagtatcacctgcagacctggggttttctccagcaataccagtcaccttcatacagagcctatgaggccaagaagacatgcccatgtctatgaacatagacaagttacatagtctttcttgtgcttccattttactttgtttttaaactgtaaagtggggataatgactgttcccatcttagagagtcaatgggcaaattcagtgagaaaatgtatgtaaaatatttagctgagttcctgacgtaattcatatgattaatggtaagaagaggtttgcatacttgcttttcaaatgactatttcttggagttagaygcgtaattagatcatgttgatatgactaattttgagttcaagttaaccttaaccacacttctatcttatttcagatttttgggtttctgatatgcttgggaattattcttgcaataggaaattcaatctgggagagtcaaactggggaccaattcagaactttcctcttttggaatgaaggagagaagagctctgtgttctccggattcttaacattctggtcatatattattattctcaatacagttgtacccatttccttatatgtgaggtaagatgagagtttatattttaatgaaataatttcatcaaaacctttgtttccaatattatttgttttaaagtttcarcagtgcaatagatgtcttgctcttaactgcttatgatctgcaacatctgttacaaatgggacagcttagctgtttaatctgttaacttttatgttttcaaattacaataaatgcggttaattttcttcttgatttgatttggtttcttagaaatgtttttctttgtaagacatgcactacaatataatctcatgtaacctgatcaattagaattgggttaattttgagtaagaaaaggaagaacattggggagatctatagagagggtgcctctttgccactagactggctctatagatacatggattcaggtcctattctaccacttactagctccataaccttgggcaagtagcttcatcttctagtgcctcagttccctcattttaaaaatgaagaaaataatagttctacctcatacgattgtatgaggagtgaatacatgtctataaagctctaagaattcctgacacattataaaarcttaatgaatattagcttttcctattattagtaactataagtatgtacataaaggagttaaaatatagtaggtggtgctagtccattgtaagataagaagtatgatttataacttctactacaatttgatctgtcaggattagattcggtcccataaattagagctaaggtggtctctctttttgcctctctgtctaygcacacaaacagaacacatacacacacacacacacacacacccctctttatttatatacatatgtatgcatgtgtgtgtgtgtgtgtgtgtgtgtgtgtgtgtgtgtgtgtgtgtatttgataaagcttagaaattggccctagaatctgtacctgggacatttttgatcctaatcctaacaaggctgagccagactgtccccaaaacattggagctaagatgggacttggttggttgacagttctcatcatcagtactttaacagtacacaaaatcatcagctccaaatccccacttatttttatgaacctctttttatctctcttcaaaaacctagctatgatgaagcaagggaagtttaatgcacaaaatccacccttgttttgggtagtggtcaggaaactgaaatgccaagttgtgggaaattcacttgaagtagtggcatgtggycacaataccacatattgcttygggccctctggagctgtggtcagagagggctctatttaaactatatcctactggctcatctttgattctgaggacctctcatgcttgtatccaattataaagtctgtagtaaatcctgctctttgccggaagagctacagtcagcttttatagcattcctttatgtcctaaatgaataataaatgtgcatagtggctttccatctgcacatgtgcagtttcatatgtcctcacaaaggaagtatattatgtatacattctttctttgaagtacattggcattttcatttaatgatttgaaagattgatttttttttaagagaccaaaggtagattctcaggttggcattccttatacttctaatgtgccatggtacaattgacagaaaacgtatttataattgtccaaacccagtttctggtcttggtactgccactaatagctgtgtgaccttggagaaagtgcttggcttctctgtgccttagtttgcttgtcaaatatgtacttccccataaaataaggggattaaaagaattaatttctgagttactttattctccaaataatatcaccttacctttagataacattataaatatatatttgatatcagtataacactttatcacttaaaaactactttcttatgcattctttcttataatgttcaaaattactgatgttctataatataccataaaatatgataccttaaaactctgaatacttttctctttttttagccttttatattttacacttccacatactttatctcatttatgtttcccaacaatcttatgaagtaggatttgctgagctgctttcaaaatgggatgagaggatttgctcaggatcatgagctaaagaggggcagaagtcttctgagagttgggacagtgttttyctatatccctaagctatgtatgatttattactcagtgaagaaatcaaaagaaaaaaaagagtctagagttctgtccttgttgttaggcatattgatgaagacaaatgagagcttttctcttaccaaataagtacagtgattctgatcttaactcgagggaaaaagcattccaaggaatttcaggtttctcggtcctaaarattgagacataggaaaagagaacacccaggtatttctgtccggaatgatgaagaccttctgccaaagcttctattaggctttagaatatgtacaaagagtaaattagtgccatatatcacttgaggatagaagttcagtatttgctttgaatggttaacaattccaggtgagcaaaggacacttactttggtaggatatttctatgttgtcagtttgtttatctgttgtgttaaggcgtacccagctayagttttttttaaatacataatcttaagaaatgcagccattgttttcccaaggaattagcttttgagtgttctttccaaagcaataggaattcatttctatgttgcttgttttgcctgagactgggtgaaattataagctctgttctgtgagtattcaggcagaaaacactaagtggctggattatgttaactctgaatatttttctccttttctctgctattgtaaaagaaagcgctgaatgttccactgtgagtcttctgaatcctcttttcccaaacaaaaacgatgcccattttctcttcagacttttaagttctaggaatttgaataaattttgaatacttccattggattatactataacacaacaatcaaattgtttcattcactttggtttaagattacagggagctactagactttcagataaataaagaacttcatgatttgtgttgtgaccctcataatgccattcttaaggcctgttctgcactggctttcccaaatccctgagttctagtcttggctctgtggctaattattgatgtgaccttgggttagtcactttatctctctaagtcttaatgtccctgttggtaaaattagagtctaaagagttaaaattcatacactcaagactgattgactgcctctgatgggcaagacactaccccagcccattgtaagtgctaatgctttttgagtgaaaagagtaaggaaaataaagctgaatcagaccagctagcaaggaatttacatggagggtgggggtggggtgggatgcagaagagtaaaccatatatgaaaatatataaataaataaacaaagagtgtcagttatgtatcttaataycatatcatactctacatagtcacagtgtaatttcagggagaaaaaaactgctaccatccaaatagttaaaaaatgaattggcgccatacctcttttggggagggaaacataggtatgtcatgtacttttagaacttgaagcatataatttataaccagaaaggatttgagtgtcatctagcccaactttctcactttacagatgagaaaaaccaaggattaatttccactaagatcagaaataagctatggttcctgctattaccrtaactattttctactgttctggatatccttgtaaattacaaagacgtgaaactgaaatatccatgaataaaataagacatgaaactgaaataaacctattagaaaggaagaacacagacaataatatgattataaatctagtcaatccataagaataatctgtaaaactttcagtaggacaatttggttgtgtctgattatgaaagwaacattaaaaaaattaaaagctttcttttagacaacaacaatttaaaaacttatcctatcagtaaaaagttttatattctgccctttgtatacgtgggttttgtatctatggactctaccaaacatagatggaaaatatttggataaaaaaaggatggttgtgtctgtactgaacatgtacagagttttttcttgtcattattccctaaacaatacagtataacaactatttacatagcatttacattgtattaggtattataagtaatctagagatgacttaaggtatacaaaaaagttatggataggctatatgcaaatactctgccattttatgtaagggatcccccacagattcaagggacaactgtgatgttcaagaacaaatctataagactatggtatgaatctatatgaaaaagcaaaactaaactaaactaaaattccttactaattgargtactttaaaaaatggaattcctaaaaagatttgaccttcttgaagttgtatttaagtttataaaatatcagttcttttcaaataattaagagtttaacatagacctaataaaaatctcaaataaattttgtagaaaaattaatacattgattcaaatgtttacttagatggatacattgattctatcaggaaaaataaatgggtgattatagttaagaatttttgaagaggaagagaataaaggtgattttgtttcttgtacgtattgccagttattataaagctacaataatgaaaacaacagatgtagtaactgtcatatcaatgaataaaattgaaatccataaatcagatgctagtgagtaaaatgatttatttgtgacacagaargcatcccagcttaatggagaaaggattgattgttcaacaaatggtgatgtaaaatcttcttatttggaaaacttgaaatttgctcctcatatgtatatcaaactttcaatttcaatcaaaaatttcaattgggataaggaattaaataaggaaaatatcaataaaaacaaagaaaaatgtagatgtctgtatatataatcttggcatagagaagacatatctaaacaaaactacaaaaacagaaagtataaacttttgataaatttgatcctttagaaagagaaaactcatattgaaaaactggaaacaaaatgaaaagacaatcagccagctgtggtggtgcmtgcagtcccagctactctagaggcagaggtgggaggatcgcttgagctcaggaatttgaggccaacctgggcaacatagcaagaccctgtctctaaaaaaaaaaaaaaaggacaagtggctgggtgcggtggctcacacctataatcccaggactttgggaggccgaggtgggtggatcacctgagggcagtagttcgagtactcaagtagttcgagtagtagtagtgaaaccccgtctctactaaaaatacaaaaattagctgggcatagtggagcatgcctgtaatcccagctactcgggaggctgaggcaggagaattgcttgaaccagggaggcggaagttgcagtgagccgagattgcgccgttgcactccagcttaggcaacaagagcggaactccgtctcaaaaaaaaaaaaaaaaaagacaaatgataaattggataaaatatttgcattgttttttgacagaattaatagacttaataactatagaattcttacaaatcattaataaatacactgatatcagaataggaaaaataaaataggcagatacaattagatagttccaagaagaaatgtcactggccaataaaatttgaaaaaagtgttaaactcattgataagaaatgcagtgaacagtggtgacataccttttgaatttgcatgtggtgaaagataattcttaataatctgatggtagaaacttatgttgctatgacgtttttggaaattagtttggcattatgtatgacgttgagcattgagagagttcatacactttgccataaaaattctgcttctggagctggaagtcataaatgattactagaatgtaatcagaattatattaatcataattattgtaataattaatgtaattatgtaattagaatgtgatgcaacacttttcatggtaaatgggaagagtggtatgacaacacatcctgttttcactcagtatttgttatggtttggttctgcttcatggaaatactgttttctatctcttttggcaaagtgaagccacatcaaacaatgtattggagagaatgttctcaatagcacatttctttagatcagacataagacaaacatcttcaataatcattagtttcccctaccacagagttccctaactcccaggccacagacctgagctctgcctcctgtcagatcagtggcagcagcattagattctcaaaggagtgcaaaccctattgtgaactgcacagcagtttatatattgcagtattataatagaaataaagtgcacattaattgtaatgtgcttgaatcatcctgaaaccatcccccttcccctgatctgtggaaaagcgtcctccacaaaactggtccccggtgaccaaaaggttggggaccactgccgtatcttataggaggagacacaaaataatacactacacacaaagtctccaccgggcctgtttaatgtagaaaaccaggaaacattccctaaagctttattctaagctgacttattgttttatggtgttgtagaaaatgacttggaaatgtttataaacagactctgttgagaagcttctgaagatccctgggacctagggacagagcatccacattttcctctaacccctggagactttggcagacttcttattttggcaaaatattgtatgttctgaaattaatggagcatttctttctttttttccattttaatggatgatagtgtggaagtaattcgtctaggacacagttattttataaactgggaccggaagatgtattattctcgaaaagcaatacctgcagtggctcgaacgaccacgctcaatgaggaactggggcagattgagtacattttctccgacaaaacgggtaccctcactcaaaacatcatgacctttaaaagatgttccattaatgggagaatctatggtaagagaaacagttcctttctcttaacgatattgttaacaatttcttgaataactgaccccattaaaaaaaaatttaaaaatccaaaacagtcgctggctttcttattaatatgggcaccgtcagcatctaccatatagatgctgatatgcttggcagatgataaattctcactaaatatgtattggataaatgttgagtaatttagatgaaactttggatttattgccattcatggatagagaaragggttagatatgatactctctgaagttcgtttcagtgctctgtrtgattctttattattattattatactttaagttttgggatacatgtgcagaacgtgcaagtttgttacataggtatacatgtaccatggtggtttgctgtacccatcaacccgtcgtctacattaggtatttctcctaatgccatccctcccctagcctcccacgtcccaacactccctggtgtgtgatgttcccctccctgtgttcatgtgttctcattgttcagttcccacttacgagtgagaatatgcggtgtttggttttctgttcctgtgttagtttgctgagaatgatggtttccagcctcacccatgtctctgcaaaggacatgaattcatccttttttatggctgcaatagtatttcatggtgtatatgtgccatattttctttatccagtctatcactgatgggcatttgggtaggttccaagtctttggtattgtgaatagtgctgcagtaaacatrtgtgtgcatgtgtctttacagtagaatgatttgtaatcctttgggtatatacccagtaatggaattgctgggtcaaatggtatttctggtttagatccttgaggaattgccacactgtcttccacaatggttgaactaattcacattcccaccaacagtgtaaaagtgttcctatttctctacatcctctccagcatgtgtttttttcctgactttttaatgattgccattctaactggcctgagatgatgtctcactgtggttttgatttgcatttctctaatgaccagtgatgatgagctttttttcatatgtttgctggccacataaatgtcttcttttgagaagtgtctgttcatatcctttgcccactttttgatggggttgtttgtttttatcttgtaaatttgtttaagttctttgtagattctggatattagtcctttgtcagatggatagattgaaaatattttctcccattctgtaggttgcctgttcactctgatgatagtttcttttgctgtgcagaagctctttagtttaattaggtcccatttgtcaattttggctttcgttgccattgcttttggtgttttagtcatgaagtctttgcccatgcctatgtcctgaatggcattgcctaggttttcttctaggtttttatggttttaggtcttatgtttaactttttagtccatcttgagttaatttttgtataagktgtaaggaaggggtccagttacagttttctgcatatggctagccagttttcccaataccatttattaaayagggaatcctttctccattgcttgtttttgaaggtttgtcaaggatcagatgggttgtaggtgtgtggcgttatttctgaggcctctgttctgttcagytggtctatatatctcttttggtagcagtacatgctgttttggttgctgtagccttgtagtatagtttgaagtcaggtagtgtaatgcctccagctttgttctttttgcttargattgtcttggctatatgggctcttttttggttccatatgaaatttaaagtagttttttctaattctgtgaagaaagtcaatggtagcttgatggggatagcactgaatctataaattactttgggaagtatggccattttcacaatattgattcttcctatccatgagcatgggatgttttcccattgtttgtgtcctctctcatgttctagaacagtggtttgtagctctccttgaaaaggtccttcgcattccttgttcgctgtatttctaggtattttattctctttgtagctattgtgaatgggagttcactcatcatttggctctctgtttgtctattattggtgtataggaatgcttttgatttttgcacactgattttgtatcctgagactttgctgaagttgcttatcagcttaaggggatttgaggctgagacgatggggttttctaaatatgcaatcatgtcatctgcaaacagagacaatttgatttcctctcttcctatctgaataycctttatttcgttctcttgcctgattgccctggtcagaacttccaatactatgttgaacagaagtggcgagagagagcatccttgtcttgtgctggttttcaaagggaatgcttccagcttttgcccattcagtatgatattggctgtgggtttgtcataaatagctcttattattttgagatacattccctcaatacctagtttattgagagtttttagcatgaaggggtgctgaattttatcaaaggccttttctgcatctattgagataatcatgtggtttttatcattggttctgtttatgtgatggattatatttattggtttgcatatgttgaaccaccttacatcccagggatgaagccaacttgatcgtggtggataagctttttgaagtgctgctggatttggtttgccagtattttattgaggattttcgcactgatgttcatcagggatattggyctgaaattttctttttttgttgtgtctcttcccagttttggtatcaggatgaggctggcctgataaaatgagttagggaggagtttctccatttctattgtttggaatagtttcagaaggaatggtaccagctcctctttgtatttctggtacatttcagctgtgaatctctctggtcttgggctttttttgttggtaggctattaattactgcctcaatttcagaacttgttattggtctattcaggcatttgacttcttcctggtttagtcttgggaggttgatgtgtccaggaatgtatccatttcttctagattttctagtttatttgcatagaggtgtttatagtattatctcatggtagttttatttctgtgtgatcagtggtgatatccccttcataattttttattgtgtctatttgattcttctctctttccttctttattattctggctagtggtctgtctattttgttaatcttttcaaaaaaccagctcctggactcattgattttttgaagggtttttcgtgtctctatctccttccattctgttctgatgttagttatttcttgtcttctgctagcttttgaatttgtttgctctttattctctagttattttaattgtgatgttaggatgtcaattttagatctttccatctttctcctgtaggcatttgttgctataaatttccctctaaacactgctttatctgtgtcccagagattctggtacatcgtttctttgttctcattggtttcaaagaacttacttatttctgcctttatttcgttatttacctagtagtcattcaggagcaagttgttcagtttccatgtagttgtgtggttttgagtgaatttcttaaccctgagttctactttgattacactgtggtctgagagactgtttgttgtgatttccattcttttgcatttgctgaggagtgttttacttccaattatgtggtcaggtttagaataaatgcaatgtgrtgctgagaagaatgtatattctgttgatttggggtggagagttctgtagatgtctattaggtccgcttggtccagagttgagttcaagtgctgaatatccttgttaattttctgtctcgttgatctgtctaatattgacaatgaggtgttaaagtctcccactataattgtgtgggagtctaagtctgtttgtacgtctctaagaacttgctttatgratctgggtgctcctgtattggatgcatatatatttaggatagttaactcttcttgttgcattgatccctttaccattatgtaatgcccttctttgtctcttttggtctttgttggtttaaagtctgttttttcagagactaggattgcaacccctgcttttttttgctttccatttgtttggtaaatattcctccatccctttattttgagcctatgtgtgtctttgcacatgagatggctctcctgaatacagcacaccagtgggtcttgactctttatgcagtttgccagtgtgtcttttaattggggcatttagcccatttacatttaaggttaatattgttatgtgtgaatttgatcctgtcattatgatgctagctggtcattttgcccattagttgatgcagtttcttcatagtgtcaatggtctttacaatttggtatgtttttgcagtggctggtatgggtttttcctttccatatttagtgcttctttcaggagctcttgtaaggcaggcctggtggtgacaaaaatctctcaacatttccttgtctgtaaaggcgtttatttctccttcacttatgaagcttagtttggctggatatgaaattctgggttgaaaattctttactttaagactgttgaatattgaccctcactctcttctggcttgtagagtttctgcagagagatccactgttagtctgatgggcttccctttgtgggtaacctgacctttttctctggctgtgcttaacattttttccttcatttcaaccttgatgaatctgatgagtatgtgtcttggagttgctcttctcaaggagtatctttgtggtgttctctgtattttctgaatttgaatgttggcctgcctcactaggttggggaagttctcctggataatatcctgaagggtgttttccaacttggttccattctccccatcactttcaggtacaccaatgaaacgtaggtttggtcttttcacatagtcscatatttcttggaggctttattcgttccttttcattcttttttctctaatcttttcttcatgctttatttcattaagttgatcttcaatctctctgatatcctttcttccacttgatcgattcagctattgattcctgtgtatgcttcacgaagttcttgtgctgtgtttttcagctccatcaggtcacttatgttcttctcccaactggttattctagctagcaatttgtctaacctttttacaaagttcttagcttccttgcattgggttagaacatgttcctttagctgggaggagtttgtttttacccaccttctgaagcctacttctgtcagtttgtcaaactcattctctgtccagttttgttcccttgctggtgagcagttgtgatcctttgcaggagaagaggcgttctggtttttggcattttcagcttttttgcactggtttttcctcatcttcatggatttatctacctttggtctttgttgtgggtgaccttcagatggcgttttgtgtggatgtcctttttgttgatgttgatgctattcacttctgtttgttagttttccttctaacagtcaggcccctcagctgcaggtctgctggagtttgctggaggtycactccagaccctgtttgcctgagtatcacyagcggaggctgcagaacagcaaaaattgctgcctgttctttcctctggaagctttgtcccagaggggcacttgccagatgtcagccaggactctcctatataaggtgtctgtcgacctccgctgggagatgtctcccagtcaggatacacaggggtcagggacccacttgaggaagcagtctgtcccttagcagagctggagtgctgtgctgggagatctgctgctctcttcagagccggcaggcaggaacatataattctgctgaygctgcgcgcacagccaccccttcccccaggtgcgctgtcccagggagatgggagttttatctataagcccctgactggggccgctgcctttctttcagagatttcctgcccagagaggaggaatctagaaaggcagtctggctacagaggctttgctgagctgcagtgggctccgcctggtttgaacatcctggctttgtttacaccgtgaggggaaaactgcctactcaagcctccgtaatggtggatgcccctcccaccaccaagttcgagcgtcccaggtcaacttcagactgctgtgctggcagtgagaatttcaagccagtggatcttagcttgctgggctccatgggggtgggatctgctgagttagaccacttggctccctgacttcagtcccctttccaggggtgtgaatggttctgtctcactggcattccaggtgccactggggtatgaaaaaaaactcctgcagctagcttggggcctgcccaaatggctgcccagttttgtgcttgaaacccagggccctggtggtgtaggcacctgcgggaatctcctgctctgcgggttgtgaagaccatgggaaaagcgtagtatctgggctggaatgcaccgttcttcatggcacagtcyctcaaggcttccctttgctaggggagggagttccctgactccttgcacttccccrgtgaggtgacaccccaccctatttctgcttgmccttcatgggctgcacccactgtctaaccagtcccaatgagattagccagttaccttagttggaaatgcagaattgcctcccttctgtgttgatctcattgggagctacggaccagagctgttcctatttgtccatcttgcccaggtccccccagctgtgtgattctgttttgtagtgctgaatagaaccatatcctagggagggcaagttcttggtagcctgagttatgtcagtaagggcagcattttatacttgattcctatcagctctggggtttatgtaagtgcacatggttttgggaatctactattcatttacggggctgccttgaatggccagataagctgtttcattaatacccacttcttgtttgcgtgcttttatcagaatacatgctctacatttggcttttcaagcattctgtttatatgtgacccttgtcaccccaacgctggccgttttgcagattgttccttctgctgagagcacagaggmtctgcggaactttctgtggattcctctggtctcccaatgtcccttcatgggattctgagtgtccactttctcaatacagaaatctcaggargtaaaggaaatccaagaaaaaggggaaacttttcctttgtcccctgatgggaaacttcacacattgccaagtattttaaagcaagatttgaccctgaacaaaactaagaagaagttgatgtttgcaatctcctactttttgacctcctttggttacccacacccctataacccatgggcattatggtttcctcagctgtcttccactcccagcttcccctcctgccttctctggcagtagacaagatgatttccaacctggacttccacaagcccacagttgcattgttatatcaatgtattaatcttatatcagtatcataatgactggtaaataacatagaacctttccttaaaaagttcccattggacattattttcagaggctttctaaaaatattgctttaacccaaaacatagtttaaatgggaaacttttaatcagaatattgaaaatattttgagttttggggaccttttggattttttttgccacatattgatctaataatacaatcacttctaggaagcaatcttaaaggacttatcagacatgtggaccaggattcatttgttgaaatgtttatcacattttgtgataaatgtcctatttttggagaaggctcttgactttcacaagatttttgcaaatctccaaattcacaaatcccatgatagcttgtaattcctctcgtgaaatgcaggaaagtaacttaaaggtttaagtaatccctttagactcttaatttatatgctgttataatttataatgcatttataacatcattaaaataaattcttagtaaagcactcaatgtttcagaatcatttttccttgttttcatacaagttgggggtattaatatcacagatgtaggccttgggaaaatttaacatttgactttartttatctaaatcttctatttcctggctaagaaatattatcttcttaggcaatttttcttcactttcatcaacagccctgtaaatgggcttttactgtagggaggaggcagaccatttaacacaaagacacagttttttttttctttttctcttttccatcattttattacagtgactgcatacagggtaaccactagagcataacacagtgaatttgagatttaaattccaggtgctaggccagattcactcactagctcagggactcctcccacacagcagccatacagcattscagattcagaccagcaccccagagaaacaacaaatagaactgcttgtcaagtggttggtgctcatagcattgtataaagaagagagagagaacttagatttaaaaacccactatgcttactttagttttcatttagtcatgtcattttgaaccattctttggttcccttatccataaaacagaaatgaaaatcttcactttgcaagtttattataaggatcagtgataatttaagagcctggcacaggttgattcaagtaactttttttttttcaacttttaagttcaggggtacatgttcaggatgtacaggtttgttacataggtaaacgtgtgccatggtggtttcctagacagatcatcccatcacctaggtattaagcccagcatcctttagctattcttgatgctctcccttcccacatcaacaggccccagtgtgtgctgtatcccgcatgtgtccatgtgttctcatcattcagctcccacttataagtgagaacatgcagtgtttggtttcctgttcctgtgttagtttgctgaggatgatggattccagctctatccatgtcccggcaaaggacatgacctcattccttttcayggctgcatagtattccatagtgtatatgtaccacattttctttacccagtctatcactgatgggcattaggctaattccgtgtcttttctattgtgattagtgttgcaatgaacgtatgtgtgtgtatctttataatagaatgatttatattcctttgatatatacccagtaattggaatgctggatctaatgttatttctgcctttaggtccttgaggaatcgccacactgtcttccacaatggttgaactaatttccagtcccactgtaagagtttctttctctccacaaccttgccagcacctgttattttttgaccttttagtaatagccattctgactggcgtgaggtggtttctcattgtggttttgatttgcatttctctacaatgatcagtaatgttaagctttttttcatatttttgttgtccccatttattcttcttttgagaagtgtctgttcatgtcctttgcccacattttaatggcggttgtcgggttttttctcttgtaaatttgtttaagttccttgtagattctggatattagacctttgtcagatggatagattgcaaaaattttctctcattctgtaggttgtctgttcactctgatggtagtttctttaagtaactcattattattataagaaatttaatcctggcaaatagtatgaaaccttccaatgccaagtaaaaattaaaaaaattaatgactcacaatagggaaagggaaaataaattatgctacatctataatcatgggctactatacaacgattcaaaataagattcacaacaatttgataggagaaattctcatactttacatggttaaaaactgtaaaaacaagaagattatgaacaatatggtgaatatatgtgtatataaaaatacacaataaaatcattctacaaatactagttatttctggatgaagggaagtgatttttattttctattgtaaatgtcccttattttctattagatctataataagtacatattagctttgtactaagaaaaaagttattttaaatttctggcatatgggtggctatgttttctgactgcagaaagtactggcattgtttaaggcttacatgctaatttgatcttgatattacacagatgtgtctggcccaaaccaagataggcaaagttctgcattgggaagaattggcctggcaaggatatcattttggatttctcaacagtgggaatgatgtggaagatagaaatttgcctcttgcaaatatcatagataatgtaataacagaatgataacatttacagaaaaacataattgcttcattttttgttttaatgcctactgcactttagtcctatcttgggcaaacacgaatgtctcactgcataattkccatgtttatggttacaatttgaaagcactcctaaaaccattcgcctgtttaaattcataatgccatttagtaatggtgatgtaataaataataagtgtattccttaaarctaaatgtctaattctaatttcggtttcacttacttttaattctcaatttttgttttgtcaggtgaagtacatgatgacctggatcagaagacagaaataactcaggtgtggaagtgataaaattttattcttagttttaatttcaaattatatgtacttttaagaaaatgataaacttttagtgtcctgatttccaccaagaccagatgagatacttaatgcatagcattaaaaaatagattaatatgattcaaaattccttctcatattactgaaccaaccacagagttccttctattttttattcttgagatatttatgcagatacaaggaattatatttccacaccttttacatagtgagaaaaataattatataggtggtagcataatttacataatgttcttcagcgttctcaacaatatatcttggagatctttctagattagttttaaaaaagtactttctcgttctttttaatggctgaatggtattttgttatattgatgttccaaaatttatatgaagagactctaatggacatttaggattttcaatatttttctagtaaagaaaatgcagcaaaaaaactgtgtacatatgttatttcacatgttagagaatatagaatctgtttctagaaatagaattgctaaatcaaaaggtatctgcatttgtaatttgataaatattgcaaattgccttctttagaatttataacaatttaccctgasacaaacaagtgtaagagtgtctgatttcccccactgtcaccaacacaatgttttatcaaagtttatgatctttgatgagattatatgaaaaatgggtacatcaatattggttctaattttaacttctcttgttataagtagggtcaacatattttcatgtttaagagcttatgatatttctgtaagtttctggttcataatttttttttttttttgagatggagtcttgctctttcgcccaggctggagcgcagtggcgcaatctcggctcactgcaagctctgcctcctgggttcacgccattctcctgcctcagcctcccgagtagctgggactacaggcgcccgccaccatgcctggctaattttttgtattttttagtagagaccaggtttcaccatgttagccaggatggtcttgatctcctgacctcgtgatccacccgcctcagcctcccaaagtgctgggattacaggcrtgagccactgcgcccggcctctggttcataatttttttacccattttcttctattgggttgtctattacaaaaattaacttgtatatttctatattagggaaaataagtatttgtctgtgaaatgagttttatgtattcttttcccaatttgtcctttgtcccatgattatttttctggtatttttgccatgaaaaatattttattttcatgtaattgagtttatcactttttcctccatcactgaggtttatgccttagatataaagcacaccatcattatagagttaatgttttacatttaaatcttagattcatttggattttatcctggtgtgggatgtaaaatataagtccaaatatatttttctctagatgattactgactttacccatttatttaaaagcctgtcctctttttcactgatttgggatattacttttatagcatgcctaactcttgtgtactaggtctattactgaatttttgatgtgttttctttctggcatatgttagcatcatactgttttaattattgacaaaggctgggcgtggtggctcatgcctgtaatcccagcactttgggaggctgaggcaggaggatcacatgaggtcaagagttcaaggccagcctggccaacatggtgaaaccccgtctgtactaaaaacataaaaattagccaagcgtggtggtggtgcctatagtcccagctacttgggagcctgaggcaggagatttgcttgaacctgggaggcagaggttgcagtgagctgagatctcgccactgcactccagactgggtgacagagactccgtctccaaaaaaaaaaaaaaaaccaaaaaaattattgacaaggctcaaggctctaacatttggtaagactggttgtttttcagtgctctttttttcccctagatttctcttaactgttttgcttatttagctttcctcatgatatttttgttagaatgatgttaaatttattgattatcttaggaagtgttaatatccttatgatgttgaatcttcttatccaagaacacagtatgtatttcaagctacttaattcatattttgtgcctctcagaagcattttcaggttttctgcataaataccttgctcattaaaaaaaattattcctaggtatgcaattaatttttggggttattgtttccacctagtgtctttctctccattatscctcttaatatgaaagcaataaatttgattgttaattttgtataacactgtcttactatattttcttttgtttatagtaacttctagtcttttttgtggggtttccaagtatataaccatactatctggaaatagagacaattttatccctgtcattctaacttttttacttttaatttatttttcttatctaattgcattggttagtactcttagaataatacaaagtaatatggtcttttttwaaatatcttyatttctgacattagtgcatatgcttctagtattatcccactaaacagaatgaaaaatttggattagaatagatatatttttggaatattcatctattccataaatataaatttattttcacacataaaaatttatttttctaaagtacaagttggatactgaatttagcaatagccctttgtcacccatgaggataataaaatgttttttcttccgtggatatattaatatgatgaatcatattaacagattcaatttcatccatattttcctggaataaatgccacttgtcatgttaaactgttttttaatatgctactagattctatttactaatgctttatttagatatgcacattgatctttgtaagagacatggttctgcagtgttcttttttgggataatatttgttttgctaccaatgttatatttgctttagaaacataaataagggatccttccttctttttgtattctgtgggacagtttatataaaatcaaaataatatatgccttaaagttttcataaaattcccctataaaattatgtggacctggtgctatttcaggtggtagctcttagataatgttcttacagtcttgtctacagtagttatctgtttagaatttctatctcttttggagtgatttggaaaattatatttttttagaatattgtcaaattcaatcagattttcacatttatttgcaagctctcataagtcttttaaattcacatttattttcacatttatttacaaagactcataagtcttttaaattcatatttcttttcgcatttatttgaaaagactcataggtcttttaatttcctctttatctgtggttctttttattatttcttatgtgttgtttttgtcctttcctgtcttaattatgttagtaaatagtttagttgccccttcttccatgaaaaagtatagctgttggatttacttatttttttcctgcattttaatcaataacttctgcttctttattaatgccttcttcgttccttacagttttttgttttgcttttccctacttcatacttggatgctttatttatttatttttattctttcctgttttttaagaatacaaatatttaaggttaacaatttccccctgaacactgctttagttttattacatatattttggcatgtagtttattaaagtattttaattttatttttatatgattattttatctttatttttctaatatcagtgagttcaaattgaaccaytgagtttgaaccataagcttttaaggaagaatttaaaatttgcagatggtaagggtttttttctccctaattttattgcactgttaataaaagaatatatttttattgtttctaccttttagaatttattgagattttctttgtggcttaataaggttaattgttattaatgtttcaggacccttaagaagaaagtacttgtattctctgttcttaaggtaggaattagctatgtataatttagctctatcttgttaattatatttttttaggtcttctatataattatttatcttttatttatgttatctgtttgagttgaagaagctaattaaagtgttctgatcataggtcatatatattccaaagtctgttttattgagtattgatgctagtttttggttacattgatggtcataatggtttaacttttattatgaattacacaatttaacattaaaagtactcttttttgactcattcaattcttcttggcctgatttaaacgtcatttgatattaagatcattattcttgagtatttttcgtttatatttgcccaccttttattttcaaagtttctgaattactttgatttaggtatatcttttgtgtagaacacagggctatagtttgcttttgctttaagttccaatcttttaatgagtttggcccatttacatggggctatatcttgtcttggttctgttataatattttaggttattactttttgtctttataattcttaataattatttccttatatggtctctttcttttactctgtgtgtgtgtgtttgtgtgcgtttcttgtaatatttaaggaagtattttattgtttctgtactgtatactctcaagtgtttacataatactttaaattttttcttaaggcagcattgatcaatttcctaatatgaacaatgatgagattattatttctctttcgtttcctcatattttcctaatatttttcttaatagtactcttaatctgaaatgtatataaatttctatgagtcgatttgcagctttaaaagatattttttggttttcaaataccaaaatgaggaaatcaacatgttctcccaattttttttttgcaatcttttcacatagtcaagtgtgtaatatttgcattttgttttgtcatcctaatctattggttttagacctattccttcagctaaagatattttgtgtccaccactaactagtccctttctcatttatttttttcagttatttttctatttggctgaagttcaccctctaatttcaagaatacttcataagaaatatctattcaggccaagtgtggtggctcacacctatagtcacagcactttgagaggtgaggtgggaggattgtttgaggctaggagtttgagaccagcctgggcaacatagtgagaccctgtctctacaaacaacaaaaaaaaccaattagctaggcatgctggggcacacctgtagtcctagacacttgrgaggctgagataggaggatcacttgagtccatcagttccaggctgcaatgagccatgatctcgccactgcattccagccsgggtgagagtgatactctgtctcaagaaaaatctgttgagaactatttgttaactttatatttgaatgacagtttgtctataaactctttgggccagtttcttctctggatggttttagggaagtccaaggccagtgtttattttagaacttactagtcatataataatatatacacttattttaaatattttaaaatataaaaacttataatgcaactgtgttcaaaatttattacatgaacaaaacagtctgtgattaaataagtttctatgattctgtgaccaacataagtaactgagtgtcttgtgtataagtcatctcatatacttggataaagtgtaaaataatattattctacaatctctaagacaaatcatctgtcaaacttatttcccatcaaatgtttttgaaaagacattattacagggataatacttgagtcataaacttttaaaagtatatattgtacattccagaagtcagtaatcccttaatagggatcatatttactattgaatcttttcccactatttttttctgttctttattgaattccattttattcattttgtttctattttttactcttaacaacttttttagtgttgagtatggtagtgttaactgtaagctcatagcaaatctgtagaattttttttaatgttgcatgactgaaactctatactaatttcacagcaaatcaccatattctcatttccccagtctctagcaagaaccattttatktcatgtttcaatgagtttgactactttagagatctcataaaagtggaataattctgtatttgtcattctgtgaccagcgcttttcatttataataatgccaagagtcatccatattgtagcatgacaggatttcctccttttttatggctgaataatattccattgtatgtatctatcacatttcccttatctgtttgtctattcatggacatttaggttgcttccacctcttggctattgtgataatgctgcaatgaacatgggaatgcaaatatcttttcaagatcctgatttccattcttttggacatataagagattgcaggatagtatggtagttttatttttaattttttgaggaactttcatactgttttctatagtgactacaccattttacatttctatgaacagtgcaccaggattccartctttctacatcctcaacaatacttgggattttctgttttgtttgtgtgttttttgtttgtttgttttctttctcccatttttgttttagaatcggggtacatgtgcaggtttgttacaaaggcatattgcagaatgctgaggtttgggatacagttgaacccatcacccaggtagtaagcacagtacccaagaggtagtttttcagctcctgttctcctctctctatgctacctctagtaattcccactggctattgttcccatctttgtgtccatgtgtgcccaatgtttagcttccacttataagtgagaacatgtggtatttggttttctgtttctacgtttgcttaagataatggcctccagctgcatctgtgtagctgcaaagaatataattttgttcattttttaatggctgcatagtactgcatagtgtatatttaccacattttcttaatcctatccaccgctgatgggcatctgggtttattctatgttttttgctgttatgaatagcaatgtgataggcatatgggtgtaggtgtccttttggtagaatgatttattttcttttgggaattacccagtaatagggttgctgagtcaaatggtagttcaactgttagttttctgagaaatctccaaatggctctccacagtggctggactcatttcatttgcaccaagagygtgtaagtatccccttttctccgcagcctcaccaatggctgttgttttttgattttttaacaaaaatttttctgactggtgtgagatggtatctcgttatgattttgatttgcatttctctgatgattaatgatcatgagcattttttcatgtttgccgcctgtatgtcttcttttgagaagtgtctgttcatgtcctttgctgactttttagtaggaatattcattttttgcttgatgatttaagttccttatcaattctcgatattaagtctttgttgaatgcatagtttgtgagtattttctcccaatctgtgggttgtctgtttactctcttgatggttctcttgctgtgcagaagctctttagtgtaattaggtcctacttatcaattgttttgttgctgtattagtcagggttctctagagggacagaactaataggatatatgtatacacgaaggggagtttattaaggagaattgactcacacagtcacaagatgaagtcccacaataggccatctgcaagctgaggagcaagaaagccagtctgagacccaaaccctcaaaagtagggaagccagggcagggccaaaatggctgactagtagcagtgacattcagaggctcccataaaaaaagccataataagcatgtgaatccttcaccggcaaccaaggtatccaggttctctcttcaaaattgactagaaggctggcatgacccacggagagaaggargagcagtgtggtgggcggcctacctgagagacatacagagaaggggaaccccctgcctccagccaagggaggcagtgagtgagcacgctacccagccggggaaactgtgctttttccacagaactgtgcaacccactgatcagaagatcccacttgcaaacccaccaaagtctagcatcccaactccrgaatgtgcacattctcagctggaatctgcttaagccctgctgaactccccgagggaggggtgaccaccactggctgctgctgcctgctgtctaagccttttgagctccttgaggaaggagcagcaatcagcaatgggactcacaactgcctaacatgctaagctccttgggtgggggaagggcagcaccaatttctgtagctccaggatgcacttttcccctgctggagccagggaggctgaacagcttggtcccaagacttgtccccacagctcaacacactggctgtggtagtctgcggccagagggcctcttcaggtctaaccctgacccatccttctcagtgagctgggcttccctgtaggatctccagtaactccagccagagacttagggatagaatttggctttccctggacctgagcccctagggggaggggtggccgcagtctctgcgcaccagcagacttagcctctcctcctggttgttctgaggaatctaggcagcccagattaaatgggtttccacccagtgaaacacagcccttccaccaagagacaaagtgcttcgttaaatgggtcctgctccccatgccacccagctgggcgagacccttcaacaggggttgtcagacaccctatacaagagtgatcctactggcatcaggttggtgcccctcgaggtcagaggtcccagaagaaggagaaggcacccatttttgctgctctccagcctccttgagtgacatctccaggcatgggagtgaatcagatgaataaggcctgaagtgaacccccagcaaactgcagcagccctgcagaagaggaacctgactattgaaagaaaaacaagcagaaagcaacaacagtattgacaacaacaacaacaacaaaaggcccccacaaaaaccccatccaagggtcagcagcctcaaagaccaaaatgagacaaactcatgaagatgagaaagaattaacaaaaaaaagtgctgaaaacccaaaaggctagagcacctcttcacctccaaatgattgcaacatctctccatcaagggtgcagaactggacagaggatcagatgggtgaattggtagatgtaggcttcagaaaatgggtaataaaaaactatgatgagctaaaggagtgtgttctaacccaatgcaaagaacctaagaatcttgataaaaggttagaggaattgctaactggaataatcagtttagagaggaacataaatgacctgatggagctgaaaaacacagtatgagaagttcgtgaaatatacacaagtatcaacagccgaattgacyaaacagaagaaaggatatcagagttcaaagactaccttactgaaataagacaagcagacaagaatagagaaaaaaagaacgaaaagtaaggaacaaagctccaagaaatatgggacttcataaaaacrccaaacctatgattgattggaggaccagaaggagaaggggaaaatggaaacaatctgaaaagaaacactttaggatattatccaggagaacttccctaacctagcaagacagtccaacatgaaaattcaagaaatacagagaacgtcattaagatactccacgagaagatcaaccccaaggcatataatcttcagattctccaaggtccaaatgaaggaaaaactgctaagggcagccagagagtaaggccatgttgcccacagagggaagcccatcagactatcagcagatctctcagcagaaactctacaagccagaagagattgggggtcaatattcaacattcttraagaaaagaattttcaacccaggatttcgtatccagccaaactaagattcataagtgaaggagaaataaaatcctttccagataagcaaatgctgagggattttgttaccaccaagcctgctgtgcaagagctcctgaaagaaacactgaatatggaaaggaaaaacccgtaccagccactgaaaaaatacattaaattataaagaccaatgacactatgaagaaaccgcatcaactagtgtgcaaaataaccaaatagcatcatgatgacaggatcaaattcacatataacaatactaaccttaaatataaatgagctaaatgccccaatgaaaaggcacagactgggaaattggatagggaatcaagacccactagtgtgctgtattcaggagactcatcttatgtgcaaagaaacaggctccaaatacagggatggaggaaaatttatcaagaaaatggaaagcaaaaaaaagcagggtttgcaatcctagtctctgacaaatcggactttaaaccaagaaagataaaaaaaagactaagaagggcattacataatggtaaagggaacaattcaacaagaagagttaactattctgaatatatatgcacccagtacaggagcaaccagattcataaaacaagttcttagagatctacagagacttagactcccacacaataatagtgggagactttaacatcccactgtcagtattagacacatcaatgagactgcaaattaccaaggatattcagcacttgaactcagctctggatcaagtggaactagtagatgtctacagtactgtctaccccagatcaacagaatatacattcttcttagtgccacatggcacttattctaaaattgaacacataattggatgtaaaacactcctcagcaaatgcaaaagaactgaaatcacaaaaaaacagtctctcagaccacagtgcaattaaattagaactcaggattaagaaactcactcaaaatgacacaatttcatggaaattaaacaacctgcttctgaatgactcctgggtaatgaaattaaggcagaaatcaagaagttctttgaaaccaatgagaacaaagagacagtgtaccagaatctctgagacacagctaaagcagcattaagagggaaatttatagcactaaatgcccacatcagaaagctagaaagttctcaaatcaacaccctaacattacaattaaaagagctagagaggcaagagcaaactaatccaaaagctagcagaagacaagaaataactaacagcatggaagaattgaaggagatagagacacaaaaaaccctccaaaaaatcaacgaatccaggagctggttttttgttgttgttgttgttttttttgtttgtttgtttktttkttttttttttttagttaatacatagatggctagctagactaaaaaagaagaagagagagaagaatcaaacagacacaataaaaaatgataaagggaatatcaccactgacctcgcagaaacacaaactaccatcagagaatactataaacacctctacactaataaactagaaaacctagaagaaatggataaattcctggatgcatacaccttatcaagactaaaccaggaagaagttgaatccttgagtagaccaataacaagctctgaaattgaggcagtaattaatagcctaccaaccaaaaaaagcccaggaccagacagattcacagctgaattgtaccagaaatacaaggaggagctggtaccattccttctgaaactatttcaaacaattgaaaaggagggactcctccatactcattttatgaagccagcatcatcctgataccaaaaccaggaagagacacaacaaaaaaagaaaacttcaggccaatatccctgatgaatatcgatgcaaaaatcttcaataaaatactggcaaactgaatccaccagcacatcaaaaaacttatccaccatgatcaagtcagcttcatccctgggatgcaaggctggttcaacatatgcaaatcaataaacataatccatcacataaacagaaccaaagacaaaaatcacatgattttctcaatagatgcagaaaaggcctttgataaactttaacatcccttaatgttaaaaactctcgataagctaggtattgatgggacatatctcaaaataatagctatttatgacaaacccacaaccaatatcatattgaatgggcaaaagctggaagcattccctttgaaaaccagtgcaagatgccctctctcaccattcccattcaacataatattgaaagttctggccagggtagtcaggcaagagaaagaaataaagggtattcaaataggaagagaggaagtcaaattgtctttgttggcatacgatatgattttatatttagaaaaccccatcgtctcagcacaaaaacttcttgaactgataagcaacttcagcaaagtctcaggatacaaaatcaatgtgcagaaatcacaaacattcctttacaccaacaataggcaagcagagagccaaatcatgaatgaactcgcattcacaatcactacgaagagaataaaataycaaggaatacagcaaacaaaggatgtgaaggacttcttcaaggagaactacaaaccactgctcaaggacataagagagaacacaaacaaatgggaaaacattccatgctcatggataggaagaatcaatatcatgaaaatggccatactgcccaaagtaatttatagattcaatgctattcccatcaaactaccattgtcattcttcacagaattagaaaaagctatgttaaatttcatatggaatcgaagaagaccctgtatagccaagacaatcctaagcaaaaataacaaggctggaggcatcatgctacctgacttcaaactatactaccaggctaccataaccaaaacagcacaataccagtaccaaaacaaacatatagactaatggggcagaacagacacctcacaaataagaccacacatttacaaccatctgatcttcgacgaacctgacaaaaacaagcaatagggaaaggatcttctattcagcagaagaaaacctaggcaataccattcaagacatagacatgggcaaagacttcattacaaaaatgccaaaaggaattgcaacaaaatccaaaattgactgatgggatgtaattaaactaaagagcttctgcacagcaaaagaaactatcatcagagtgaacaggctacctacagaatgggagaaaaattttgcaatctacccatctgacaaaggtctaatatccataatttacaaggaacgtaaacatatttgcaagaaaaagacaactccatcaaaaagtcggcaaagtatatgaacagacacttctcaaaagaagacatttacatggctaacaaacatatgaaaaaaagctcaacaggctagtaaccccttatcagatatatgatctgcacatatttcctcctattccataagttgccttttcactctgttgattatttcctttgctgagcagtcttttttttgagacagagtctcactctgtcacccaggctggagtgcagtggcacaatcttggctcactgcaacctccatctgccaggttcaaacaattctcctgcctcagcctcccaagtagctgggactacaggcgagtgccaccatgcctggctgatttttttttttttttttttgtatttttagtagagacagggtttcaccatgctggccaggctggtctcgaactcctgacctcctgatctgccgcctcgacctcccaaagtgctgggattacaggcataagccattgcgcccagtcctgagcagagacttttacatttgatatagttccacttatttgtttttgctttcattgtctgtgcttttgttgtcatgtctatgcaagaagtcattgtcgagaccattgttatgaagcttttcttccatattttcttctaggagttttatagttkcagggattatgtttcaattttcaatgtattttaatttgatttttgtgttagatgtaagataatggtccatttttttcttttgcctgtgcatatctagttttcctcactctgtttgttgaaaagactatcctttccctgctgtatagtcttggaacccttgttgaaattcattcatctgtttatgtgtgggtttatttctgtgttctctattctattccactggtctgtgtctgtctttactggggataccagtaccccactgctttgatgactgtagcttgtaacatgtttgaaatcaggaattgtgaggaccccagcttggtccttcttcctcaagatagttttggctatctggggtcatttgtggttccatatcaattttagaattttttttatacttctgtaaaaaaaataccattgaaattttgatggggatttctatggttcactttgggcaatatggagattttaacaatrttaagtcttctactccatgaccattggatacatattcatttatttgtgtctttaattgctttcatcaatgttttcttttttttttttttttttgagacagagtctcactctgtcgccagtcgccaggctggagtgcagtggtgagatctcagctcacttgcaacctctgcctcccaggttcaagtgattgctctgcctcagcctcccaagtagctgggactacaggcacgtgtcaccacgcccggctaatgttttgtattttagtagagacagggtttcaccatgttggccaggatggtctcaatctcctgacttcgtgatccrcctaccttggcttctcaaaatgctgsgattacaagcatgagccaccrcacccggcctcatcaatgttttctaattttcagtgtgcaagggttttgagagcccccagctcaaactggggctccagcgccagagcagctagcaacaaccctaccgtgatagaaatgaaggagagctggacatagatgtttacagtgtgcctttcaggggatatttcttttacctggcaggtgacctaatgcttagttgtctgatcatttgccaaggagtccttcacatgggaaacttgtttatattggcagacactcctgtggctcttgtctgaccagtgttcagtttatgcctggctgaccattgtcccggtgctgggagctaggccttgtgttcttcccagtgttccaggaacaacccagtctggggcagcccctgcttcttcagatggaagatgtaaattcaatacaccaccatgataagaaataagttcaaatatttttacttagagatcctgggcaaggagggtataataagttaggagggcagtccttcatccctgggttgcaagaaacaggaaggaagagtcaggcagagagatttaaaaaaaaaaaaaggattaattagcaggatatgtaaggaaatagagtttgggtcactttaagctcacaggaaaatgcttgaatgatctgtttaaaggaagcaacaggaaattggggaacccagtctgctaggcaagagaagatgcttctaagttctaatctgtggctactggcttagtccgtttgtgtgtggtatagaactgggaagtgtgttaaggatgactgagccctgcttctggactgagaaagttgaattatattcaaaatgaatgcaaaggcaacatataatcataagaatttactacaagtctttcatctccttcgttaatgttattccttagtgttgtattctttttgatgttactttagatgagatcgttttcttcatttttgggggttgcttgttgttactatatagaaatgtaactgatttttgtactgcaactttactttttaaaattttttgtcttgtaactttacagaattcatttattttaatatttttaaaaaatggtgcacctaggatatgtaagatagcatcatcttcacatagggacatttttatttcttcctttccaattgatgtgccttttctttctttttcttgtctaactgcactggctaggactactagtattacatctagtagaagtgatgagaatgggcatccctgccatgttcttgattttacagaaaaagctttcagttttttgacattgagtatgatgttatctgtgggtttttcatatatggactttattatgataaggtatttttctgctgtttcttttttgttgagagtttctttttaaatcatgaatggatgtttaattttgtcaaatgctttttctgcatattttgagatgatcatgtgattttattctttgttctgttaatgtggtgtttcatattgatttttgtatgttgaatcatccttcaatcccaggaataaatcccactttgttgtagcatatgatccttttaatgtgattcaatttactagtcttttgttggggatttttgcatgttaattggggtaatcagcttrtatatacttttcttgtgttgtctttgtctggttttgttgtcagaataatactggccttcaaaatgagtttggaagtgttccctcttgatcaatttttttggaagagtttgagtaggattggcattaattatactctacatgtttggtagaattcaccagtgaaaccatctggtcttgggcttttctttgtcaggaggtttcagattactgattcactctctatactagctatgggtatgcttagactttctatttttcatgatttagttttggtaggttttatgtttctaggagtttgtctgtttttctagtgtttccactttgttggtctataacttttcgtaagtctcttaagattctcttaatttctgtcatcatgttttttctttccctcatggttttatttattttagctttttgttacatgactctagctctttgaggtataaaattaaattgtctgagatcgttcttcttttaattatatgcatttattgctatgaacttcctccttagtactgcttttgctatatgccatgaggtttggcatgttgtatttcactttcatttgtcttgaaatattttcaaatttcttttttgagccagtggctattcaagaatactatttaatttccacattttggtgaggattccacttttccttttgctattgatttctagtttcwtcacattgtggtcagaaaatatatttgacataatcttaatcttaaatttgttgagatttcttttgtgctctaacatgtgatctattcttggcaatagtctgtgctaccttgacacagaatgtgcattctgctgttgttgggcagaatgttttgttgtatatatgttgggtccatttggtctatagggttgttcaagtcctctgtttccttattgatctgtctggatttcctatctagtgttgaaagtgaaatattgacacctcttactattattgtaatgctgtctaagtctcccttcagttctgtcaatggttgcttcatatatttcratgatctgatgttgggggcatgtagacttataattgctacatcatcctggtggattgacccttttatgaaatgtccatatttgtctcttgtaatggtttttgacttaaagtctgctgtgtctcttttaaatatgaccacctcttctctcttttgtttgccattttcatggaatatttttttccatcccttcacttttagactatgtgtgtccttaaatctcaagtgagtttcttgcaggcagcatatagttgggtgatgattttttaaaaatccatttaatcactttatatcttttaattggtgaacttaatccattcacatttaaagtaattgttacaggaaaggatttactattaccattttgttactcattttctgttatatagtagttcttttgtctttttgtctcttgctgtcttcctttgtgttttgtcagtctttcgtattaagatgctttgattcctttctgtttttcttttatgtaagttctataggtactttttctgkttgccttggagattacataagatgtcttatagttatgatagtttaagttgataacaagttaaatcacatacaaaaatgctatacttttaaatgtcacaatttgcatctgttcattttatgtacctttaagctattgtggttacagttattttaaatagtttggtctgtcagcttttatatttgaatgaaaagtgatttaactaccaccattacagtaatacagtattctgtattcatccatatatttacctttaccaatgactttcatattttttcacgctatcatgttgctgttttgcatcctttcatttcaatctgaaagactccctttggcatttcttgtaaggcaggtctagtggtgattcactccctaagagtttctctctgagaaagtctttatctctctttcgtttttgaaggagagtttagctgggtctgttattctttgttggcagatgtttttttcagtcctttgaaaatattgtcccactccctcctggactgcaaggtttctgctggaaaatctactgatgatcttgtggaggttcccttgtacatgatgagttgcttttctcttcctgtttttaaaattctctttgacttttgacaatttgattatattttagtgtggttttttttttgtttgtttgtttcatttaatttggtgatctttgggcttcttgaaaatggatctccatttccttctctagagttgggaagttatcaggcattatttatttaaataagctttctggtcctttccatctctcttgtcctcaaactctcataatgcataagctgttctgtttaatggtggcctatgagtccataaagattttttcacctttttcattctttttctcttttttccccttaactggataattacaaatgacttgtctttgtttggtgaattttttttcctgtttgatcaagtctgctgttgaacccttgtagtgaatttttcaattcatttattgtattcttcagctccaaaatttgtttttaaaaatttttttaaagtctttttgttgatatttgtaaagataaaaaaaaawttttgttaattttgcttatgcgtcattttcttgagcttgtagagcatctttacaacagctattttgaattatttgccaggtaattcatatacctctgtttctttagactaatttctggaattttattttgttcatttctttttattttattttttatttttttgagatggagtcttgctctgtcacccaggctggagtgcagtggcgcgatctcggctcactgcaagctctgcctcccaggttcatgccattctcctgcctcagcctcccgagtagctgggactacaggcacctgccacctcgtccagctaattttttgtattttttagtagagaccgggtttcaccatgtttttttaatgactttttttttaaatgacttttcttacttctattcctctttaaatcactaggatgtggggagatatgggactactgtgttttctgtagtttcttttttaccccagtgctctctccaatttcactttagtttctgcagtagccctatttttttcttcttttttgaagactgccatgttattttattttctgctgattttctaaatacctcctccccaagtttctgtcttgtgttattgctttatagattgttggcttcatccaattttccttttttaaattaaggaggaaatgtttggtcacagttttcttctgctttattactagtgaatgtacttcatcttttattatttttttctgtacattacttttttttgtagtatcattgtatgattcctatagaggtttctttttattttatttttaatatagttttatttcaatagcatttggggtacaagtggtttttggttacatggatgaattgcagtcgtgaagtctgagattacagtgcactcatcacctgagtagtgtgcattgtatctcatatgtagatttttatygcttaccctcttcccaccctcctcacttctgaatctgcaatgtctgttacaccactctatatacctttgcatacccatagcttagcttccacttataagtgaggacatatggtatttggttttccatttcttagttatttcacttggaagagtgggctccaacctcatccaagttgctgcaaaaaaacattttattctttttttatggctgagtagtattccacggtgtatatataccacattttctttatttactcatcagttgatgcccgttttaaattggttttgtatctttgcaattgtgcattgtgctttgataaaaatatgtgtgcaggtgtstttttatatgatgacttattttcctttgggtagatacctagtagtgggtttgctggattcaatggtagatctactttcatttcttggagaaatatccatattgttttccatagagggtgtactaatttatattcctaccagcagtgtacaagcyttcccttttcaataaaggttttttttaaattattcattattgtaggaactgaatttttctttgatcagttaattgcagaaggttcattttggaataagggtaagggtgatttctttgttctggttcaggattttgtattaaatgtgattaggtgttaccttgcrccagcctatggcaataggtcaaactttttctctctgctaacccagagtcagcatgtttcctggaaatttttattgtctctggaattccttgtttagttttgccttctttgtctctgggatcaaaccaagtccaggaacctcctcttgacagttgaytcacaccctttactattatagtaaataaaggttatgttccttccctctaagcattgtgtgttagtgggctttttttcctgtgagattttaaccactgtgagtgctctctttgtattatcttgactcttctccctttattacccctcccctataaatgtctactccctatcccccaccataattctttcttttcccagtttggttgcaatcacacctaattcaaaaaggtgtggcttgggttctattaatttccctaaaaatatagtttgctttctctttctcattctctgtcttgctctctctgtctttctctctatgtctctcgagggtgaattctagcaagacaaggagggactctgtttttatgctgtgatgaacaagtcaaaaatctaaatgttattgaccaattggtgctctgcctgaaaattcctccttttttgatttcagatacttttagagtgcaataggcaaatcatccagaagtgaggaaagaagccttagtaattgtctagaagagtttggccttttgtagactaagtcattgaggacctagccccttattctctttccagattcattttcggccacatgaaccagatacttcagccatatggtactccttagagtctttccaaataaaccaccctcatttttctttgtctattttgtttgttgattaaaattttttttataatttcaacttcaatttagattcaagggatacttgtgcaggtttgttacatgggtatattgcatgatgcggagatttgaggtatgattgattccatcacccagggagtgaacatagtactgaataggtagttcttcaacccttaccccactccctacctccctgctgtagcagtccctggtgtctattgttgcacctttatgactrtgtgtacccaatgtttagctcccacttataaatgagaacatatagtgtttgattttgtgctcttacattagtttgcttaaggtaatggcctccagctgcatccatgtggctacaaagggcatgatttcattcttttttatggctgtatagtattccatggtgtgtatgtaccacattttctttatccagtccattgttgatggcacctgggttgattccatgtctttgctattgtgaataataccatgatgaacatacaagtgcatgtgtattttcggcagaacaatttattttcttttgggtagatacccagtaatgggctgttggcttaaatggtagttctgttttagattatttgagaaatctccagactgctttccacagtggctgaactaatttacactcccaccaacagtgtataagcattccctttactccacatcctcaccagcatctgttgtttttggctttctaatgccattctgactggtgtgagatggtatctcattgtggttttgatttgaatttctctgatattggcctgtagttttcttttatcattgtgtctttggcatattttctatcagggaatgctggctttgtagaatgagttagagaagagtccatcctgctcaattttttgtagtagtttcaatagaattggtaccagcttttctgtatacatctggtagaatttggctgtgaatccatctggtctgaacgtwtttttggtttgtgggtttttaaattactaattcaatttcagaactcaatattggtctgttcarggtttcaatttcttcttgwttcaatcttgggatattgtgtgtttccaggaatttatccacttcctctaggttttccagtttgtgtgcatagaggtattcataatagcctctgaggatcttttgtgtttctgtgagattgattataatgtcacatttgtgttttttattatgttttttggatcttttctcttttttttctttgktaatcttgctagtggtctatcaatcttgtttattctttcaaaaaaaccaacttttggttttattgattgtatagacttttgggtctcaattgcattcagttctgctgtgacatttgttagctttggtgttagtttgttctgctagctttggggttaattttttcttgttcttttttttgtaggtatgygttaagtcattaattgagatctttctaactttttaaggaaattgtttagcattataaactttccccttattactgcttttgcctcatcccagagattttgatatgttgtgtctctgttttcatttatttcaaataatttttgacttctgccttaatttcatactttacccaaaagtcattcaggagtgtttaatttacatgtaattgtgtggttttctgagatcttcttggtattgatttctatttttgtcctactttggtctgagaatatgattcatataattttgatttttttgactttgttgagatttgctttatggctgagtatgtggttgatcttggagtatgtgtcacgtgcagaagagaagtatgtatattctgtggttgatgggtagagtattatgtagatgtctattaggtccaattggtcaagtattgaattcaagtccagaatttctttgctagttttctgccttgatgatctgtctaaagctgtcagtggggtgttggagtctccctctattattgtgtggctctctaagtctttttgtaggtctagaagtacttgttttatgaatatgggtgttccaatattgactgcatatataatttggataggtaagtcttctggttgagttatatcccttatcattaggtaatgcccttctttgtttttttactgttattggtttacagtgtgtttcatctgttagaagaatagtgatccttggtcttttctgttttccatttgtgtgacagaactttctccaactttttgctttgagcctgtgggtgttgctacatgtgagatgggtctcttgttttatccagtttgcctctgtgtgccttttaagtggggcatgtagaccatttgcattcaaagttaatattgatatgggcagttttgaccctaccatgaaactgtcagctggttgctttatagtttctattgtgtggtagttctacacggcctgtaaactatgtacttaattgccacactcactttctcacataggcctttgcaaattatacccttggcttgaaacaatatttgcctacctttctatctgggtaactcctgctcatctcttcagctttggcttagatgttacttgtttgggaatatttcctgacacctctcttccttcccccgggtccaacgtgcttgccttatcatggcacttaccatatatggcctgtttttcagtgtcccaaaatagactggatttcattgagggcaggaatagcatttggtttaccattctatccccagcactcaaaacattgcctggcccacagtaggtgcatgataaatatttgatgaataaatgttcactgcctatttcaaagcatactgtattgtgtattaatcaatgaatggctgatatatcctgaaattctggacaatatgtgtgttcagtactggaattactattaaaatattctttttaatatttttgtcttttcataagagttaaagtactcatattttgtgtttcaaatatcttaatagttggctgaaaaatgtcaaaccatagatagtctaagatccatgaggctagagatttttgttttgttcatttctgaatccctatcacctagaaaagtgcttggtacgtactgggcactcaatacatgttttctgaatgcacaaatgaaaacacggagtttgcctccttaaatattgtgaactatacctgtctcttgtcttacctagtcctsgccctgtgaggcttaattgaatatgtgaaggtctattgaattcctccctgcaaaaagaggtcttcagtataaacatagcacatattttctgggtagaattggggcagctaatgagggtttttgtgccctagtgaaaagtctgctacatccttgatcttaggggcttgaaatcacaaggaccaccttctctctcattcaccctaaagtgaaacgtgatagccaataagtcctgcctttgtagagttcgctcagtcttggtgttaaagatgcctgagcagtaacaagtcactgtacattaggaacatttctgtgataaatgtgagagataaaaaccaaaatgcagtaaaaaatatgacctaagataattaagaaaatagaacagaacccaccaacagttataaactataaattggaaaactcgaacatcagcacagagatttgggaagttataacatccatgaaacaagaacaagatgctctggagagaacacaggaaaaaaagaaaagagttcctggaaattaaaaaaaaaaatcttgacaaaccaaaacattcaatagaagggctggaagattaagtcaagagactctcccagaaagtagaatgaaaagaaagactcagaacatcagagaataaagacaaaataaagggtcaactggcagatccaaaatttaactaagactgttttctagatgaaagaatggaaaaacaaacaaacaaacamccaaaaaataatgaagaggagaaaattataaagaaatatcagaagagaacttccccaaatcttccaattgaaagagtctcctgaatactcagaaacaatgaatgaaataagatcaatacctctaaaattacaaaccagaaaggataaagagaggaacttaaagcttttaaaggagagaagtggggcacttaccaaaagatgaaagtcagactaacatcagatttaccatcagcaacacaagatgccagaggacagtggagtgatcccttcaaatggctctcaacctaaaattcgatattgtgtcaaaccatgagacaagtgtgaggcaggataaagacattttcaagcagaaagcctcataacttttgcctcccatgatctttttcttatgaaatatgtttaagatatgctacaacaaagcaagagaatcaattaagaaagggggtggcatgrggtgaggaaacagtgactccagcccaagagagtaatcccaggatgcagctgagcagcagacctgacaaacaatcagccttgagtgggtgacaccacgaaggcccatataacaaagtgcacattttcctctgctgtgaaccatagttcaaagacagacttatgtacatatcttttattcattttcaacttttagaatcaatctttagaccaataaaaagtatttaagtttggctacagraaagaacacaaatgttttaaacctctatagtgaaatagaaaaaaaaataaataggttggagggagaagtgaagaggagatgaggagtgggtaataacstcatcttaccagttagggagtgtttataattgatgaactgaaacaaaacaaaacagccttctgtatgttacttagagttgcagaaataatcattaaggaaattaaactggatatgcctatatttttggaaaaagaaagtggagaagtaaagtaaatgacttaaatcttcgtctgattttggaaaaggtctaatatttataaatccagaaatggtaatatatgtacataatttacagtttttgggataaccgtttgatgtaccttctgaagtttgagagtaattttctctggggagtgggactggggctgtggtgatggaggtgggggcatgaagagtctcttgctttactagatatgccttaatgtagtatttgattttgtaactctttgcatgtattgctttgattgaaaacattaaaagtacttaaaaaagaaactagtatactgtaaacacttgatatatggcagccgttattatattagtaagggggcagggaaataatccagaattatattaaggagttgttatggcaaagtatttgaagcatggatttttggctaagtttgagtcctggctgatggatgtatatggttggccttggcaatgctcaggttctcatctgtaaaacggggataatagtagtatccactacacatcattgttcggaagattatacgtaatattccatataaaactgttagcataaagtcgggcctattataaagataataataaatatttcttattttattcagtattattaattttagaataaatttgatttaaaggaacaaaggacctacatgtggctccaattttactgtaggtattaacaagctttgtgacacagaatagataattgcaattgcccacagcattgtttctctttaaaaaagtagttataatcctatctgcttttgtaactttagaatcaattgcaaaagttaatgcagtttctctttaaaagagtagttacaatcctatctgctcttgtaactttagaatcaattgcaaaagttaatggagtctttaagaataaaaactttagcaataatcctgggggaggaaatgtggactctgcagctgataaagctcttatatgtaagtgttcagagtggaaccttctgtaggcttgctcctgaaatagatacaggctcacagttccttatcgaaaactttggagccagatatatttagaaatttaggattttctggttgtagaaagacaatatggtgttgtctgccattttattgtgcaataactccagtgacatctgagaaagtacctgtaatcaaacacattaatgtttttatattagaaaatattaattcacaagtattaggtaggctttaagaagccatcattaaatacataacattccaggtcagatattgctgcacaaatgggttcaagtcagatcaggttttgccgtaaagtaggttttgaaaaaactttgcattttctgtggttttttgtattttgaagttgtattgagcatttgaggatctgtacagccatcccatatagttttgtgatttttctttcccatatacttttggaaagttcacttctttggtacatggttctgaaatgagaagattatatttaacagtaatgatgaaacagccattttagtgccagacatttgaggctgcaaaataatayactaaaaatacttgggggaactatttttgaattttaaaagataattattggaatgaggttttggttatttttgttgttgttgttctcctacaggaaaaagagcctgtggatttctcagtcaaatctcaagcggatagagaatttcagttctttgaccacmatctgatggaatccattaaaatgggtgatcccaaagttcatgaattccttaggttacttgctctctgccacactgtaatgtcagaagagaatagcgcaggtaagtgaaaagttatgtctgagtggtgaaccttgtttttgttttttaaaattgaaactgacactaaatttgaaggatttacaaattaagcatttgagcagtgagccttgttttttgtttttgttttttaacacagaaactgatgttaaatttgaaggattttcaagttaaagatagaacatagtttatatcccatatgttttgaaaaaatgtggagagatttaagtgaaaaagaaaagmaacaaggacaatggaaaagtgaggacccaaatatgctagtcaagggatgacatcgttcttacaattgagcaccacattkgactgtaagcttctgggtagccaggacaaatactgaaatacagttgagtcacacatctctcattattagtatgcatatctaatagatgcagatgaccttcagacatatgcttagaatgaattttcccagtaacagagataaattgaccttgatattagaatagtcttatttaggctccattatgagaaggtcctcacacttgtgagatggttgtttggaactcagggttcataggatagaacaaaaccgcttgggccacttaacattttgaagctgtgagacaggtagataatggtatagtgaactggcttcttgccctagttgaacctaatctattccatttatatgttttcctcagcccactaattcttcctacaaggtctttggttctttctcaaatctgtttaattttatatctcaattttatttcttgaaatctgttaaatatattgcatgtgctgtttctgatacttccaatatctaatttttttttcagatcttattctgcattgtttctgttggttcttaggttttacttgttgttgttgtatacttttcactgtgagctgaccattttactttgaacttaatttatataaattttttgggtccagttggttcctccagaaaggatttacatttgcttcaatgttctaatgtagaaacattttaaactaaagtttcaacttgatttctttcaggccacctagatattgtgaattcagaatgcaagtttacatgagagtcagtgattggttataaattcttggcagatatttttttcccttccaattataaggagggttctatttaggcaagttttattccaagccctcttcaagggggcatgggtgtccagtttacccttatattgagagtagtctttgggggacccagttttgagaggccatctttcactggactctcaccttagacaggtactgggctatggctttttaaattaaagcccagagacattgaaaaccaatgatcaagttctcctggttcagaaaacaccctcaaggcaaatgctggctaatgtgcttctttaatcccttaagtgttctttttctcagtctctgacctgaacagttcttactttcttgcaagttcatgaatgtatttaagaatattaaaatgcttttatagttgtttgtagcagttgagattggtcctgacacccattccaccatgttaccagargtagaacttatgttatttcgtgggtagatcaagtaattgctttaagttttttccttttgtgaatttcaaaaattcattcatgtctattgtattaagtggaacaatacaatacaaaaatttataaagrtgaagctaatggtagcttccctgaactccagtctcacccctacagaggtaaccactggtaacatctagtgtktatcatttcaccctttcctctggctcataaatatatacatatattcaagaatatttctagatatttaggtgatttgtttctttttaacaaaaagaactcatagtatagccattaatatgcaacttgtttacttaacaattatcttggacatgactataaatcaggaaatatgggtctagctmtgcctaattaatagtctttaaacattaattaattttcaaattaatttttacatataaatataatataattttatataagggcttactttatatatgctgttttataaactctctctctctatatgtatatatacatataacttattttattctttttgtctcctctcccctcttacccccactccaactacacataatatcaggtaacaagtattaatatcctggtttgatttcttacatttcaagggatttcttgtatgcattctcataaaatggtcattagtggcagactgaagtagaatttggagtatctctccatcactctttagctgtgtgatctcatcaaactcatgtaacctctttcagtcataggttccaccagtataaaatggaaataataattttaataatctctacctcaaaggctgccctgaggattatttgggttaatatatattaaaatgttttagtttacaaaacattcatggcacatctctagtcacagaaaatacaaaggtttgatctctaacctaagaaactgagcacrgtgaagaggcagactcagaaatggatgttttcctataagatgacaagggctatagcagtgatatgcatagagtcctatggtatcccagaggacagataccagattgagctgttggtgagtagaaaagatctgaggacaggaaagatttttagacctgatgcttgagttgggtgttaaatactgagttggagttggcattggaactctatgaatgttagctgttagtcagtattgatacacttgtttctttaccttttaggagagctgatttaccaagttcagtcacctgatgaaggggctctagtgactgccgctagaaattttgggttcatttttaaatcccggaccccagagaccataacaatagaagaattgggaacactagttacttatcaattacttgcctttttggatttcaacaacaccagaaaaaggatgtctgtcataggtatggttggtagctaagactatttttgatcttttcatactgttgtggttatgcttttcaaggattaatttcacttttggctatgtgctgagggttgtgatagttttgaaactttatgtataaactcttgtgttgctcaacctagcctcaatactgcagtgatatataactaacatttatcaagtgctcattatgtgcccagcactgttctaaatgccttatatgagtatgtacaatgtatcaataaaaatataaaaaaattttaaaaataaaccacaaaaatgctctccatgaattaatttattcaattgtcccaacaatcctaataaggtaggaactattatatttatacccattaacagataatgaaactaagacacagaaaggttgagtaacttgcccaggttcgcatagtttgaagtagaatagctgggattcagacctaggaagtgtgactgcatagcccattcacttgttcactatacagtactggctccggatgagtttctaaattgcttggcacatgacagttgttgtgaacatcgtcctcagcctcctcattakcattcattttctctgtccacctccattgctggagaggaccacctaatattatatttagcaccacaacaaatctgtgctttcctgactcaatgctaactcttagtgctgtgtcaatgtcmctctcattcatatttagtgcctttttccattttcacaatagatattctaaaccttggctgtttcctcaagttctcaacactgctacaatcttctttactcttgaaagctaaattcatctcctatttctctaagaaaataaaggccctcaggaatgcacaccattaagtcttttccccatcctcccycttcatccctaagctgtatctttaataatttactctcctgcatcagaaaacaattgctctttttccttttcaaagctgaaggtttttccagtcccattccttatccctccttgcttgctcacttcttgcttttgccttcaatttctcaattactggctccttccttcagcccacaactatattatcctcctgtttccttaaaaatattcttcatatgctggtgtccactgactttgccactatatttttctgctttccatcccagattagtttctcaggtcagtttttgcttcttgcctttcttactcttttcatcccattagggttaagtttcttcttcctctactcaagaagaaatgctttctcagaggtttccattaaccttgtaacttcccagtccaatggcttttccttattaatctgttcatctatctatttttttaaacttagtagtatttgagactgttggccctgttttcttgacactcctgttttggtctcygtaaactttctggctcctgtttctcttcttgtcccattgttttctttctcaagctcctttgctgactattctccttcatcccattcttcaatattgatgtccttttctctttttagctcctgtgttcttcttggatgatcttgaccacatacatggtggtagctattgcttatattctgtgaccttcttatacagctgtttagcttcgatctctttctagagtccaaacacacattttcagcttccgttatgtcctgtcactggattgttacctaaagttttatgtcaaatatggaactttctttctcacaactatagttctttctataatctgtattaaaattcacagttacctctctcattgtatgcttgtccatgaactttataatgaattcttttattgaatcgttgcaactgcatgtaacatgcatgtcccatttaagacaagaggagactaaatgcaaagattttaagtaacttgccaaagattgtcacacagctgtaacacaacttgtggcrcagttgggtaagaggcagatcagatatgtgaacccaggttttccaaaatctggtcttttaaggcctaktatagctcactmacttttttccatagcttttgtgccccttggctgatggttctcaaactttacctcccatcagcgtcaccaggagggcttgttacaatacagattgctgggcctcagcctctagtcttatttagctggtctgaggtggggcccaccaatttgcatttctaacaagcttgtgggtgatgctgatgccactggtcagggaatcacagtttggggaccacttctctagactaatagatcctcaaatactatccattattttccccagagatgtttgagacatttctctaatccatctccttctcttccagtctcaggccttaacatctctagaatattctattgtcaccctgtttgtaagtctctcctcagaggcatcagaataatatttattaaaatggcctcataaacccctttttaatcatgaaagctttttgtccttttttcctaattcccagtaccctgccttagttaagtttcttgtcactgcttgcttgtattattgtaatatcttcaaaattattcgcttttaaaataatcctctatgctgtcaccaggatattctttctaaaacataggcctgattttactaccccctacttaaaaagcataggtggcttcccaaaccttaaaagaaaaagtcattagtatgacgtgcaaaattatttgcaatctgatctcaatctacttttcttctactttccaaaactttgagctcaactagacctcaccatccctggatgcattgttgctgttataccctttggacatgctgttctcctgtcttgaatactcctttcccccacttctcttcttggaaatgttccctactactcatctggtaatgtccaattcaaatgttacccatttttcaattctttttctattctccaaataaccacattcttctgtgttccccagaatgccttgttcataacaccagtgtggtattaattccatgacactcacaactatcctagtcattaaactgtgtgctacctcaggcaagtgctgtaccttagtcttcctaaactgcccaaggcaaagcacagagcttggcacatgataagttttctataaatgtttatgaaatactactcaacccagcactttgtaaattatgaatatcctactcatggtatttaatcaatttcttactatttaaaaagtgtttatacgtaacagtagggtttttggtctctaactactagaaactagccttgaaagatggctctcagcaggtaaaaaccaaataacatctgagaatgtttatttttatttttatgttttgacaacagggaagtcatcaccagtgccactgatgagcacacatgccgttctaggtgttggcttaatgttgtatcagcaggagctatcttctatttacagcctcagggaaggtgttattgatgttggtttggcccagagttggtttctttttgctctgagggtgttgacaaaaacctaaaattgctacacagggagatgtttggcttttcctcagcattggtcaccattacaggctgtggagaaattgcagcctaaccacaaacatcagatgtttgccttaatggatcccatatgaggaaaggtagtgctctaccacagaatgcatgaaggtttgctggatttatttttattctgcttggtttttaatcaggaggatttttagagggactctaccagggcagaaaagtctttgcatgataacaaggcagaaaacaatcctggtctcatgatcgtcacatgggttggtctgtaggaacaacaccctgatgcaaaggctcaggcattgcttctgttgctgctgatcctcccctttctcctcctccctcttctgcttccttgtttttgggtggcagccattattcactaaatcatcaatgtataatttcaataccagtagtactttcattctgaagaaagagccctgatttaagtcagaagtatctacataaaaattgatttctataaaggatttttttccagagggaacagaatatactatattagtaaaaaatataaatgacattatatagttttggaaggaccaattctactaattctgtaaatagaaatacagagataaaattcagagrtrgctattaacaggggcaagtggcagataaccrttaaagaagaagaaattacaagaagcttcttggaaggctcttacgagatctttagataaaagttgctcaactctaaactttttcaagattatcaaagtacaaatcacactgtcatgtgacaggcatttctctgtgtagatgtatgaacagcggcratatggcaaaatagaattatttaccacccttcacagtgctgctgttgcatctaactggaagccatttgtgacattttttctttcctttatgtcacaaaggcatagcttctkctttcaataaattgtgcacaattttggttcatcttaattaagtaaatattgatttaagttccccmtatgttccagggccttcaagctaagggagaatgtgaaaagttgaaaggtagttctatgtggctgcctccaagagaacatggtaaaacagactggatagtgcagctgttaataagctctatatgtcatgtcaaggagtccaaacttaatagaagggagagggaagctattgcaggattctaagcagcagcatgaagatgactgtaactggaatatacagaagagtctggaaggaagcagtactggaatgggtaaaaccagttaggttaaagtgattttctaggcaagagagaagtggcaagagaaatccgtagcttcccttagatgtatggttggtgaagggagaactgtgagtgatgcctagatttctgatttgggagactgaatggatggtgaagctgattactaagactggggatataagaggagtagctaattattggaggagggtaatatgtccagtatgagtttggtgtgcttgagcatatccaagagattttcaactggtagtcggatgtgcaggtcagaatggagtgctagagatggattggacaggagatacacatttgaaaacagcctggtgttggaacctgaagccatagaaatgatgcagttgcccagggacagtatgaaggatgggaagataaaaaaaagaccccaagtaaatctctgaagaacactaatatttaaatggaaagcattgggagaagattttataacctaaaaactgtaacctttgtccaagttctggccatatgttatcgtgaccatttaaaactatgtcctttttagtttatttaagaaatactaacttctgaaatgacttagattttattaactttgaacagaaaygaccagaaggcttggaagaaaagagatataaaacttgctgctaaagcaaatgtttaatgagtaaacataagcaggattccatgaaattggatttccacaaaatcaaatttaaagggacaaatactaggttaagggaaagtatcagggatggaaagtatttattgaatcagaaaattgtactgctgcaaaggacctttgaagttagattgtttaaacatctcctttttacatgtagaaactragatacagtgatggtaagggatttacacaaatcacaatcagtttgtgattcttccagaccagtgattctaaatgtgtggtccagggaaccttagggaactttgtgagtttttcagaggatgcacaaggacaaaagtattttcattataatatcactattatttatctttttcattctttttctcatgagtataccatggagttttgcagaagccacgtgacatgtgatgtcacaacagaatgaatgcagaaacagatatgggaatccaaccctcttttattaaactagatgttacaaagatctgtaatcatgtaaaataatgccaatctccaaactaatattttttggaaaatatagtttttttatagaaatgttatttatgcttatatgttagatttacaataataataattatagtaactagtgttataaaactgatataataaaatttctcatttttaatttctaatatggatattgatagataacattcacttaaaaaaactttttagaatcctcactcagcattgaaaaattataaagaaggtcctgagaccataagttagagaactaatgtcctagtctagaatacaaaatacaggcaaatgtaggttattcatcgtttgcctttatacctctggtgttggaagggagaaaatataagggaaattattcaattggattattgtacaagaaaatcaagagagagtctttcctaggattaagtttccccccctggtttaacaattagataaattgcatatgtttttctctttctttttccccaatgtaggggttagagctagagtacaagaaaacccacatgagttctggcaattaggcaagctaaccaagggtcttaaaacagaagacaagacctagacaaggcccagtcctaaaaagcttccagggtatgttattagatctatgtaagccaggaggaaactagaatagataagtgtagactggggtagaggggagggtaacattgtattttggtttttatatttttttaaattaagcactaaattttgtacgccattttctttggcattacattaacagtaaataatagtaaacatttatgttaacctttttttgaggcattctctttgtagataaatgggataattgagtagaaagcatgtaatgatctttgactgaactgatgaagcctatgagggcaagagtattcagattatgaagttgtgacaaaggcagttgtcttaagttgtaggcagttctgggaagaaatacccagccatgtcattcattcattcaacaaataattattaattgcctactatgtgtcaagctgtacaactaaacctaaaaagttaggccaagtgttctgtggtttgaaagaaagctttgtctaacagcaatatgctgggggttgtcggtgggaatggagttgagggtagcctaggaagggctgtcagtctcaaacctgtggggcaggttaaaaacacagtactaccgatatagacttccagtgggaatgaggtggaaactttatttttaaaagcccctctgtgaagtgtgttttcagccagaattgttacccaggaacgaaccaccaagaattaatggacttttccggagtaaaagggatgaagaaatatgtcagcaagggccaagaaaaaatgcataaaccatgactttgaatggctagaattgcatatggagatgatttagcatagcactgatactgatttgaacagcaggtcttgaatttcacaccaggagacaggcaaataaagctctcaattctgcttaatatggagatgaagacttaatttaaatgtatcaacccttcagaaatagtaagcaaggaaaacaggaaggtcatgtgcttcagaataaaaacacttgtttctgaatttgggaaatcaaagattccagtagatggagcatttcttaagttaataaatgagaataaarccaagtgacttaggtaatgacctaaccaaaggcactgagtgtcttactactggctaaaacattatgcccatttccaaattgccaggctggagctctgggagaatctaattttgatgtatgacgttgattatattctgcttttccaaacttttttcttttcagttcgaaacccagaaggacagataaagctttattccaaaggagcagatactattctgtttgaaaaacttcatccttccaatgaagtccttttgtctttgacgtcagaccacctcagtgtaagtgcctccgtcttaaggttagcacaatggcccttttgccatctcctatggttaggtcttgtttaaaaaaaatagcagctagatgatttgactactgaaatagaaagcatctggagaatggttccacaggaagctgtgccaatgattgtctgggaattggcacaaggaccacccccctttctgccccgttggaagtccagtcagtctctacaggtggaggaacacacagcaactgagtagtagccacagaatgtgggcgtctagggaacctgctgtaactcccctgcagcttcatgttgctcctcttggaagactggactagttttggaaagaggagacagagagctccttttccttgggttctgatgtgtttggcaccagtggaatatcttatgattacctctagggaaagtttagagttgtgtttagattgtgagaggaaaatagtctctggtgcacactttctcctctaagggtctttttattcaggtcataaatcatgatgagtcacttgtgtgccctcagacaccaaacttgtatattctgagaccagcataatttctttccaaaagctttctgaaagaagtaagagtgatttttggcacttttttgttaaatgccaaaaagtaagggaatgggaattaatatgagctttacttgttttaaacctgagattcaagtgtgtctcaaatatttgcctatggttccatttaagggcatctggtcaaaactgtcattttctcattggtttctttcctttaagatattattgagtattcatgttctttgtcagaccctatatttaatgcaaaacattccctgaatctttaaaaagcaaataaacaaataaaaaaaatcctctgtctcactttaaatttaaaaaatgatggtttggtaatattggttacaaacatagctattgttttttgtctttccaatagagaattgattttcttttaatcttttccaggaggccagcatggtcttttaaattttttttaatgaacacaacactggaatcataagtgtctgacttattgccgttactcaaacaccaaggccctggtttttcatacattctcctttaatactaaactataggaaacctaatttggtctttttacatttctctgcaaaataattttttttcaggtaatataaatttaacttgctctttgcttcattcactttattcattttgacttctagattctgaggtcttaaatgtttatttaattactgatttcgaattgtttaatgataggaaaagaccttaataaaatgctcatttaggattgaacttgtgtttcatgtactaattaaataatttaaatcatccgtttccttttgtaatgtcatcttattgttcattcactgttgtgcagaacagagaggaaggcagtggtaatgcccagtggggatgcaagttaaaggcaaaaaagtgcttgtgtgaattaagaggacaaaagatcattacaagacagtagctagattttcagatccgtaggggatccagttgtggtcttgaaaggcagggcttgcaaaatgtgattccaatatccgaagtgctaccaactgcctactatagaaatttggatactttttctcaatatctgtctggggtaaaccatctcattgcagtacgcattgacttttctatttacctaattacagtatctcacagtttaacctacgcctgattataaacctctatgtgtaccatacgccaaaacaccacagaggagacatactcaatggcaatacccaaaggagcagaaatggccataaaaatgctttacttgcagtgtagaggcccataaaatgaccactggaagcacaagcggaatgggagtttttgagcatttcccccaaagcaatctacgtatgtttctagttactatggctgtgtgagacacttagcaaataccagtctcctctttttcttttcccctactattaggataaagcaccaaaggtgtttgagattgtcacgatacaggaaaaaggaagagtatgcttccccaatcagtttgactaatttagtactaacttcatagaatatagcttctaaaaaataataccttttttgcactaagctgacttgataatggtatctttaaaattcccaacaatttgttattattaagataaaactttaatacagcaaaaaataaaaagtttcacggaggagtctataatgaaaagtgaaggtcagcctccacatttagtcctgcttcccagaagcaaccacctatattagcttttcttcctttctctccccttttgccctagaggttattgttataaccttaagtaatatgcttaaacttctaatatctgactatttaacatctatttattcatttattatttacttttagctttttatcatgaaaattttcaagcatatgcaaaagtaggactcaattttaggcataggcatatcactagggggaatgtgacaagacttgggtgtgatgtcatgttgtggttcctggggagagcctcctgcctttgatttgaggactatggcttctctaagggtcctttcctcttcactgaaagctgaggtccataaaacacactgggtccctctcatggccagaaatgcttccttccgtcaaggacagattggaaacaaatatatgttgccataaatgaatatctcaagtcatgggtgtcactgatcacctctcaactaggacacttcagcaggcttttcagctgtgtttagggggaagacttgctcccctgcatgttttaacctcatagaaataaaacggaaaayacacacattatctcccatttctgaggagattaaaaagttgagagtaaggatagccaagcagtgctcttggtacaaaatgaatttgagtgaaaaatttctcaccaattatttttgttgttgttatttctgtgcttattgtttctttgatggttcatgagtctatgtcatctctggcaggaatttgcaggggaaggccttcggaccttggccatcgcatacagagacctggatgacaagtactttaaagagtggcataagatgcttgaagatgcgaatgctgccacagaagagagggatgaacgaatagctgggctatatgaagaaattgaaagagatttgatggtatgagtttagaagcatgatggtttgtgtttacaggaaagatagtatgtgtttagagatttagcacaggaataagccattggctaagtcatcttgcacacagcagatgtttctctttcaatcactgaatcatgctttatatgttggctttgagttttccatgtatggtcctagagagcctagaattgtatttctattagcagtagcttatgcaattggaagcttcccaagagtagaagatagtaggctacctattctttgtcaacctctgatggtccttgatgttatgggatttttacttttctccttgttttattacccacctttttagagcagagaaatttgctgtgaagaatggggctacagttctaaaccatcctaagccatgagattctgatgatatctgtgctatccagagcatggtctattctaaaaaccactcttacctgaagccccagtggccaggaatacctcacccactgtgaggtactagagagtatgctttgctcaacttttgatgaaaaatcgtggccgggcgcggtggctcacacctgtartcccagcacttcaggaggccgaggtgggcggatcacgaggtccggagatggagaccatcctggctagcatggtgaaaccccgtctctactaaaattacaaaaaattagccgggtgcggtggcgggcgcctgtagtcccaactacttgggaggctgaggcaggagaatggtgtgaacccgggaggcggagcttgcagtgagccgagatcgcgccactgcactccagcctgggcgacagagcaagactccgtctcaaaagaaaaaagaaagaaaggaaaaggaaaaatcatgcaggawctttcactttagtttatggcgtctgctggtttgttaatgtagaagaatgactagactttttgtgatcagcttcctgactatgggatgaaggctattctttggactcctccactgttgatataagtggggaagcagctggggagttcttaagtccaaatggcttcctactgctcacgctaacatgttatctgagcatatcagccccttcaagtaaataataagtcccaagatctctgctaagttggcttgatttgggaacttccttctggagtccttcccaatccactttcacacaaaataggatgcctgctatatcaatgtatcataatttctgtcttcaattaatattctttggcctccagaatctgtgagtgaaatccatagatgttatagatattgtttgcatgcattaacataaacttttctctctttttcaataaagctactaggtgccactgctgtagaagataagttacaggagggtgttattgaaacagttacaagtttatcactagccaatattaagatctgggtcctaacaggagacaaacaaggtaacttgaaaatggatgttgatgatattttgaaaatggggagatgacttatatcacaaaattttaattaaccagaaaggttaattaattaaatattcacccwatcttccacataggaaagacttgaaatagagaagaggaagttaatgtattgcaagaatctattttaaaacaaaccaaactaacaaaatgccttccatagtataagctggagtcagttaagtttcggtccaattgcctcttgaatataatcattacacctagaggcaaaaatggtatttaaaatgtttaacaattggtttatatgaacactgtccccaktcaggacagatattggcacagaactaaagcaggatattggagaccttgggttactcctttagtttcttgatggtggggaatttgaaggatcttaggggaagtgtcagggtgatgggaacactttgaagaagctcagggaaacagctgtttatcaacmatttatagaaatattttggtattttaataactactacagctgtaacagtgcaacctggctgaattccaggactgtctatacaaggtacagtgagaattcattgaccttcaggcttgacaaaatgccaaatcattagtgaatcatcgtgttctactatgtttcctatgaaagaaaaggggaccaacatatttttgatctactgctagcagtaatggttaaaacaaaaatgattttatgcttggctatttgtaaatgaaaaatattcaaytaactggcatacacctatgttaaaattctatctacttattaggtattttttatagcattaggggatctgcacatgtgatgcatcaattctctacatctttatccaaatcattgatcacaaaaaataaacagtagaaagttgagcactccggtgtgttactaggtagaaactctctagagtttgattttggtcagttacagccgttctattattactaatatccatgagtttactattatttagctttaatttctgtggtttatacaaggtatatgctgagattttatcaattaccttccttaatttaggacaaaactaatgattccatagaattagctagagtctaattattctatacagttagagacaatcaaataactctattagatagaaggagttatctgattatcttaggttccatttctataaaattagaggaagaattacccaacaccatctgattctccagttctctaggagaacagtgctgggtggtttttgagatgatagtcaaattccaaatttccatatatttaatgggaaaatggcaatgttgtgtgtgagagaactataaaaatttcataagagcatttttttttgtcattcaactgaacattttgtgagttttttcttcaaattgtcttccatttcagaattaaatattggctaagtttagtagtttatctctcccaagacagtattcagacttctggtcaaaggttttatatttgtacatattatgtcacaagatcttattttcatgagtgctaatttgggaatgaaaaggtttttctgaaaactagatgagaaggctgcacattcrttagtgttgctacttgtgcatgggtttagcaagtagggaatttgatcctgaaacccaggtctttgaatttccctctgcactgcttgtattttatcacctgttgtgctctytctgacatcagccccctgtaggctttaagaaaatacagctaagccctcaaaactttcattaaaaatggacttaggttattaagtaacattttaactgarttgggctttattttgtgttagaaactgccatcaacatcggttatgcctgcaacatgctgactgacgacatgaatgatgtgtttgtgatagcagggaataatgctgtggaagtgagagaagaactcaggtaggtgttgaaggaaggaggaaaggatggaaggacgagagggagggagggaaaaaagatcagagagttgagaaagkgaaaagctatgctatagtttcctgtggtcttaacttagtataaagttctttgtgcatgtttcctaaacttcctttcattttggtgacaaactgagatgaagctgatatcagtaatgaattattgtcttcaggcctccaacatttctcaactatttttagaaaagaatttcaaatcagctatgttgagttgtcctttaaaattgtgctttggttagtacctgctcactcttgcgtggtgatgagtgatcagtatcatgagatacttcttaaaaataccaatgccctagcttcattctgacctacaaattaagaatctacacggaatgggatatgggactttgtatttaataagcacctagatgaagcttatgatcagataagtttggraaacagctgtaaacagcatataaagatggaatagagtctttcagcattaaagaaagtagatattttgatgtagttactattgaacccagatatayactgtttatgtgaaataaaatactgtgagatttgtgtaactactgcacagtaccagaaaatacgtaagtgctgaaattggaggtagcagtggacagacattaaagtttgagagataatatttcttaagatgtaccaatttatttcatttccttatttcttgttactttatttggagaagaacgtttaaaaatctacaaaaatattttcctagaacttaaaaaatactgtcttataacaatttttgcttgcttgctgcttgtagtagcttctctaagctcagctcacttagacactggccaagcagaatgatgacacagatgcaaattacttatcgcttgctccattctagatggggagctaaccttccttcaatataatagtagagctctgtggcttcccaaatatgtctctgtcattaaactattcttcctgaactttaaaaaaaggaagtcttaaaagtcagcaccactacttgatggtacttgtacacgaatctcccagcctctcggttttacctgcagttaaaaaaaaaaaaaaaacctgctatatcgtgctggttagaaactatgactaaatactgcacatgtctttgccaaataaaaattgggaaatttaattagctactactaatataatttaaatattattattggtataattttaatgatagaccccatagagtcagttggggaaatattagtaacttatttaataatcaattaaaattttaaaagtagattctttaccttttgatttttggattgactctttaaattgatatacaatatttatacatattttgggggcacatgtgatattttattatatggatagaatgtataatgttcaagtcagtgtatttaggatatccatcactttgagtctttatcatttctttgtgttgggaaagaaagtcctctcttctggctaacttgaaatatacaatacatggttgctaactatacccaccataytctgctgttgaactttataatttattccttccatctaactatacgtttgtactaattaaccaacctctcttcatcccccgcattcccacccatacaaccttcctagtgtctggtatctatcattctactctctatgagatcaacttttttagttttcgcataggagtgagaacatgtgaaacttgtcattctgtgccttatttgacttaacatggaacccgtggttccattcatgttgcttaaaatggtaggatttcattcttttttgatggttgaatagtattccattgtatgtgtatacaccacattttctttattgattcatccatttatggacacttgggttgatttcatatatatttgatattatgagtagtgctacagtaaacatggggtgcagatatccctttgatatagtaatttcatttcctttgaataaatacccagtactgggattgttagattatatggtagttctatttttagtttttggagaaatctccatagtgttttctctagtggctgtactaatttacattctcaccaacaaagtgtaatagctccctttaccagcatctgttatttattaatttatttatttaatagtagctattctagctgaaataaaatcacatctcattgtagttttgatttgcatgtctctgataattaatgatgttgagcatttttcatatataagttggctatttgtgtgtcttattttgagaaatgtctattcatgttctttgctttttaatgggattgttttcttactgttttaattgagttccttgtatattccagatattactcccttgttagatgaatactttgcaaatgctttcttcctttcaacagactgtctcttcagtctgttgattgtttcctttgctgtgcagaagctttttcatttcatgtagtctcacttgcctatgtttttgttgcctgtgcttttgaggtcttagccgtaaaatcattgcctagagaccagtgtctggaagttgttttccctatgttatcttctagtagttatatcattttggggattatatttaagtctttaattcatattgagttaatttttgtgtatggtgagagttaggggtccagtttcattcttctgcatatggatattcagttttcccatcactacttattgaagaggatgtctgttctctagtgtgtgtacttagtgtctttgtcaaaaatccattgactgtaaatgtttggatttatttctgggttctgtattctgttccattggcctatgtgtctgttttacaccaataccatgctgttttggttactttagtcttgtgatatattttgtagtcaggtagtgtgatgcctccagctttgttctttttggtcaggattgctttggctatttgggctcttttttggttccatatgaatgttaggaattttttttccatttctgtgaaaaataacatagtatgataattttaacaatattaattcttccaatccatgagcatggaatgtcttttcatttgtttgtgccctctccaatttctttcactggtgttttgtagttttccttgtggaggtttttcacctccttggttaaatttatccttaagtattttatttttttacagctattgtaaatgggattgctttctttctcaggtactttctcaggtacttcattattggtgtatagaaacactactgattttgtatcttgattttgtatcctgaaactttactgaatttggttatcagttctaagagtttttgatggaatcacttgaattttttctgaatgtaagatcatgttgcttgcaaacaggaacaatttgacttctatttttcaatttggatggcttctatttttttctcttgcctgattgctctgactaggaatttcagttatgttgaataggagtggaaaaagtgagcatccttgtcttgttccagttcttagaaaaaagggtttcaactcttcctcattcagtatgatgttagctgtgggtgtcatatatggattgtattatgttgagttgtgttccatctacacctagtttgttgagagtttttatgaagggatgttgaattttatcaaatgatttttctgcatcgattgagataactatatggtttttgtccttcattttgttgacrtgatgtatcatatttattacgtatgttgaaccatgcttgcattcctgggataaatttcacttgatcgtggtgtattatatttttgatctgttgtaggaatttttttctttgagacacaaaaaaaaaagccaggtgctctgtcacctggctttcactgcagtggtgcaatcgtagctcactgcagcatcgacctccggggctcaagtgatcctcccacttcagcgtcctgagtagtggggactacaggtataagccaccaccacacccaactaatttttgtattttttgtagagagagagttttgccatgtttcctaggctggtttcatattcctgtgctcaaatgatctgcctgcctccgcttcccacaggaggatcatttgagcccaggagtttgagactagcctgggaaacacggcaaaacaaggcatggagccaccacactcaagcctgctgttggacttagtttgttacttttttgttcagaatatttatgtctatgttcatcagagatattgatctgtagttttctttttttgttgtgttcttctctgattttggtatgagggtaatgctggccttgtagaacaagttagggagaattcccttctcttcagtttttttggtatacttaaggataatttatagtaattcttctttacatgtttggtagaatctggtagtgaagtcatccaattctgggtttttctttgttgggagactttttattgcagactcaatctcattattggcttttggtatgttcagattttccgtttcttcctgattcaatcttagaagtttgcatgtgtccagaaatttatccatttcctctaggttttcctgttagttagcatatagttgttcttaaagtcttgatcttatatatttctgtggcgtaagttgtaatgtctttgttttcattcctgattttgtttatttggatcctctctctttttttcttggttagtctagctaaaagtttattaactttgttcatcttttcaaaaaaaccaagttttcatttcattgatcctttgtattttttagtctattttatttacatatgctctgatctttattatcttttaccttctactaattttgggttttgttcttgcttttcgggttctttcagtcatttcattatattgcttatttaaaatctttttacttttttgatgtaggcatttattgctataaaattctctcttagcagtgcttttgctgtattccataggttttggtatgttttgtttccattttcatatgtttgaggaaatcttttcattttcatcttacttttttcattggcccagtattcattcaggaacatgtttaattttcatgtagtgtattgtttctaagttccttttggtattgatttctagtttcattccattgtggtctgagaagatacttgatatgacttcagttttcaaaaatttgttgagactgattttgaggcctaacttatgatctatactggagaatgtttcatgtgctggtgagaagaatgtgtattctgcaagtgttggataaaatgtcctgtggatgtctgttcagtccatttgatctaaagtccagtttaaatctaatgttcttcattgattatctgtctaaatgatttatttaatgctgagaatgtactgttgaagtccctcattattattgtattggagtctacttctccctttagatctaatgatatctgctttatatatctgggtacttcagtgttgggtgaatatatatttagaattgtaatatcctcttattgtaatatcctcttactgaactgatccctttatcattataaaatgataattttggctctttttactatttttggcttaaagtgtcttgtatctgatataagtatagctactcctgtttgcttttggtttctgtttgtgaggaatatctttttctatacctttactttcagtctataggtgtctttacaggttaaggagtttcttgtaggcagcatatagatcacatttttatagatccagatccaggccatctggatcacatttttaaaaaacccattccgccattctgtatttttcaagcggaaaatttaattcatttccattgaaagttgctattgatatgtgaggttttgttcctgtcacattgttaattgttttctggatgttgtatatatcttctgttcctttatttcttttttattatatatttttgtgtcagtagttttctttagttgtaactttgagtcctttctcttcctcattggtgtgtttgctttaccagtgagttttgcacttttatgtgttgttcttaatagtagatattgtccttttgcttccaggtttaggattccctcaattattttgtagggcttttctagtagtgttgaattcccttagtttttgcttgtctgggaaagactttatttccccaaagagggtaattttatttctccacaataaagtaactttatttagaaataaacttatttctccaaaaaggataactttgctgggtatagtatttcttgacttccagatactgtctttcagcactttgaatgtattatcctgttatcttctggcttgtaaggtttttactgataagtctacggtaagtctgatggagactcctttataggtgactagatgcttttctcttgctatttttagaattttatcattgtcattgactttagacagtttgactataatgtatcacagagaaaacctttttgcattgtacctgtttggggattgctgggcctcctgtatttcaatgtctaaatctcttgctagagttgggaagattttatctattatttcatcaataggcttttgaatgcttttgttctctcttcacctttgggaatgctgataattcagatatgtggttgctttatgttgtctcgcacgttatgtaggctttgtctactcttgctaattcttttgttttacttttgtttgggttatttcaagagacctgtcttcttctgaaattctctcttcttcttgatctagtctattgtcaaaactctcaaatatatttttttatttcattcagtgaattcttcagttgcaggatttctgtttggttcttcgttatgatatctacctctttggtaaatttctcaatcatatcctgaattgtttttttcatttctttgtattgtttatctttgttctcttgtatctcactaaacttccttaatatcattattttgaattatttttatgggaatttcataaatttcctattcattggaatctgttactggagaattatggtgttcctttggagttgtatttcctagctttttcacgtttcttgtgtccttacgttgctatctgcacatctggtataacagtcgcttcttccaattttgtggatttactttcataggagaggacttcctcaatatgtatcttggtattggttgggtagggcactttggctttgattctggatgtgtgcagtagtatagtctccatataatttatttggctttcttttttttttttttttttttttttggtaaacaaagccagtggtgtctgtgacttcctcagtggcttagggtgtggttgttaatggagactgtagtgaagttttattgggcatggggacagcaggtgggacagtccttgggccccagtgggagcagtggtaggctgagcctgcctgtctttgggtccaagggtagcacatttggcactggcattagtgtgtcctggtgggatgattcttgggccaccaggaggcttgctcaggtgacagcagtagaaacagtgggctggaccttgggcccctgggctgcaggcatggcataggcaatggcagtagcagtggttggacaactctctggctcccaaatagcctatgctggtgttggcagtggctgtgacaggctggtcaggccattccccaggtccacgggtggtaagtgcaggtgggtgctagctgtggtggtagtggcaggctgggttagtctgtcttccagtctctgggaggagtggtcatgatggtggatggagccacggcagtggatggtggatggagcagggtgatccccaggcccctaggtggtatgctcaagtactggggtggggggtatggagtgcggtcaaagccagactggacagacctgtctgtatgttccccttctccccgctgtccagtggtatgtatgggtgctggctgtggtggcagggacagggttatcccaaggcctctggtggaatgctcaggtgggggtggcagtagctgcactctggccgtgctggctgctggggtgagtgggattgcttttagtagtagcagccttaggcaggtggctgggaagtgtgtgctttggctgtaggtggcagctatatgtaaggtagcctatccttagggcatgtggaaatgtgaggaagtcctgttgctggaagggtagtggggttgctgtcagcgtcttgcactttggccatggtggcagtggtggcagtggtggtggctgcaggtggggaatgtcagtggagctccaggaatgtggaaagccaagtactgttgggccctcaggcaggatgcagtctggtggggctgggctctcaaaatgacactttgctgtcattttgtggtatgtgggacccagtgtgagctccctctctggggcaatggcactgccttgtcttcaggcagctccctatgttaatttcagggtctgaaagggttgagaggctctcctatggctaggagtggagtctgtggtgagattgtggaccactgggcatccctcacttatactttccctacacaggagagcctttctgggctcccagccagacaggatgccttgtttccctcttcttcttttaggtgtttcctgtcacttctctcttgaactccaatattttctcttagatgacatatttgaagtatgattatctactctctatcttggtgcttctttgtggaggaggcaactgccagatgcctttagtcgtacatcttgaaggaccactctcattcagaacttgactcttgctgaaggaagatagatgcaaacagatctagattttaataagcctgttgctaaatgttttgagacagtgcctggaagagtattgtaggcagtacacatgtattacctcattttgttcttaagaaactcaatcgtaggcattactgttttccctgttggacatatgaggaagtcgaagtatatagagggtaagtaacttgcccaaagtagtccgtggttcaggtgggatgtgaatctaggcagcttggtcccagaggctgtgcacttgccatgtgtttccctaaacatacctcagatttatttttattccctttaataattaacctaaaaatatagttgttaaggtatcttactgcttcacttgagtaaatggtcagacaccagattagcaagtagagtcagcagaaatttccaggggaaatagcagatgtaggagaaagagtatgggcttcatgtcagctggattcaagttggaatctcagcttcatgcttaggctgagtgggaaacttttgatatgggaataacctctgtttgyttggtttccttatttgtaaaatggggatacaaatatctactctatatcttattttatttgggggattagataagaacttaaagctttatgactgttccatgcgcatctttcttgccttcctcattccttgtctatttcctcccttctcccttccttcattctttcagccactgatcccaatctttccaccaacaaggactacttttgtaactatttccccaataagggcagcaggcctgaaacagtggggaaggaaagggtagaataaaatagacagctttttggaggtagaatgaataggtcttgtaatttgattggatgtgaagagaaatagtaggaggctttgtcactgctaggtttcacagcccagagtgtgctcaggcatgcaagaatagaaactcattaaattttctaaaactgaacttgaacctctttctgtctgaggacagaacaattaaactaggcattttcagttaaatttagttcaagtctgggatgtacaattgcctcacctgttactgttcatcagtgtctaccctgctggcatccagcacttcccacgtctgtgttcctgtctggtctctgctctcttagggttgttgttggctttccctcttggctgacttccacactctgctggggaaccatggaaagtgtggctgctcttcctcacctctctatgcccaagatgacttgtgttcttatatggccacttcagtttctaaaatccctttactctgctgattcccctaaatttatctgaggattccattagccacatggttccttcatccactaccaatccaggggcgggtcaggaccccggctttttttagccatcacttatcagtttctaaactcctcaaagtcccctttccctaggctgggatgggaaatgaaggaaagtaatttcttcctactctgctccttttgtcatcattttaatgccttgactcatttaaagtttattcttttgatacttaaagaaatcccccccttctttttccaaaagtccaattagtgaaattccagattgctgaaattcagactaatgatgctgctatgagtttcaaagccctattttggtgctcaaaaacaaaagtttcgttgtatttttctccttctatatttggctctgcagatcctcctgaagcaaagtatgtttctagttaaatggagaggatcacttgtggtcctagtagtagtgggaaaaggagcgattgagttaatatctcaagattttatccaactacatttggttggctagatgacacaactgtcattacgtggaaagaatatggagaaatgtgaactacttgtatgctgttgttgggactgtaagttgatagaaactccctagaggacaaactagcgatatgtttcaaaattacacatacgcatagtttttacccagtgattcttctagaaatttcccttaagaaaataagtgaacaaatgtatgaatttgtataaaaaggaatatttattgctgtattgatttatgataatagagatgagaaatagctcaaataaccagccatgaaggattttgttaaatgctatgatatatacatgcaatggaacactcttcagtcattcaaagtgattttgtatttttcgacattggaaaatgcccatgatatttttgttaaatgataaatgagactacaaaacatcatgcgtaatgtgatctctctttttgcaaaaaagtgtgtgtgcatgtgtgtgtgtgtgtgtatatatatgtaggtacatatatgtataaaacactatacatctacccacctccttacctccttgcctatcaagatctggaggatataaacagtggttctctctgggtgatagaattatggatcatgtttacttccttctttatggctgtttgtattatctgatgttgtaatagtgtttgtgtaatgcttttacaattagaaaaaagctaaaaaaattatcttttttaatgagaagaaaaaatattcaaaagaaaaaaaataaagaatttccagctagactcaatattycaggagccttggggccaccttgctcagctgactggaaaataatgttatttctactcagacttgtaggtaaccccattcttagagtataagacagagaggcaacatatgatagaaaattctatgtaagagaaatcattatagttatagtgtgcattttcttaatactaggactgagggtaaaatggcatccaaaaaagctattgctcaaagttgytctctatactcctaatctcagctacttatatctaagcctacagctttgggatgaaatattgaaatcataaatttgcaccatctctttttcttgtgttatgcttttgagttcagtgggagttcatttaaaaagaaagtgtaaccaaagaacaggatctgaacaatagtagctattgaaaagaaatgaccaaaatgcttatatttaaacctgtcaaatgtgcttagattatttcataaacatggatatataatttttatacatatcatacatacggcttgtttcaaatttagtgtcgtgaaaccattttagacactttgagtcctgggttaattttgctgctgtagctgccttattattaaaggcatgcctagaaagctacagttaaaccctgctatggtttctcagaaaattactacattgaatacatttcaccaattcatatgtcttctgctgaaaggaaaacagactgagaatttaattttgattgatctgagaggaaaactcattccgtatttcatttttgtagcattgatcacgtgttttgttattagaaaaactcatgttctttaactaaatcataaagtgactccactgcttctaagaagtatcccagtgatataactaggaattgatatttcttctttaatcagcaaaatatgcatcagtattttttgaacatctacttggtggaaaattatttatttgaatgtgcagggttctcaaatgcaaatggcttcaggaacaggcatatagcattaatcatgtgatctgggctatctattatacatcagggagtgatggggcctttggtgagtgggaacatcatgttggccataaagccatagagattctttaagacactgtgcaggccaaacaaaatgcattttggtcctaattcctaacccctagtcacccaggaaaaatgttttagtacattaaatttctctcatgaatcataaaattttagagcacttacttaggtaatcttgtagatcttctggcacacactggtgcagcagcccaagttttcatgatctattttgactgcttggggcactagccaaactgactggctggtcccatttcatgaactctaataatgaaactggttcagtggttgaacatcttaaaggtctctcaggtagggtagtaaggaatggaactgggaattcaaatcaaaatttcatgtactttctccctttctctactgttggcagggtagtgctgtcccttaaaactgtccctccagcactgtgtcttagtccaacctagaggcagtctgtggctgactctatgtgtaaaccagcttggtgcagtagaccaagaactgtgaatatgaagacgtaggttccagccatggatctgtcgctggctaatcaagtggctagaggtcagataactcaactgtggaaacaaacataagatgtcagaggcagtctgaacccaggtttccaggttccaagctcaaagctccagctttcatatcaaagtccagattttcttcttttaaacaggatgtcatggtttcaatccatttccaacagatcgatttttttttttttttgagacggagttttgctcttgttgcccaggctggagtgcaatggcgccatcttggctcactgcaacctccgcctcccaggttcaagtgattctcctgcctcagcctcccgagtagctaggattacaggcatgtgccaccaagcstagctaattttgtatttttggtagagatgggggtttctctatgttgttcaggctggtcttgaactcctgacctcaggtgatctgcccgcctcagcctccccaaatgctgggattacaggcatgaaccactgtgcctggccacaacagatcaatttaacctttcaatatagagtgccttaagaggactgactaaacgactcttttttccaaccatcctcttttcttctttataggttgtatgcaagccagtatgtgcctaactatgctttgctgtgcttgtagtgacatggggctgtgaatgccacagttgcctcaactgttaatgcgattctgcatgccaagaattgtaataaactgcccttcattacgcagcttggaaaaaacaggcactcttttgttttagcatttgttatttgtattatgtggttaagcattgtgtgtacgcttcaaaaatgtatagctcatagtcattgaagggagttatgtgtagctttttcccttcctaataaatcgtttttgtgagaaccagctggtgtttgaagagctaaattccaggaagaaaaagaaatgacagctacagagcgtgggcaaaggtctaaaaatatgaaagcccaatctggccaagagacgttggcctgtacagagaaagtgcagtgacaatttcagcagagccagaaaaactgtcccttttctgcctggaaaagggttcatgtgagatgttaggaagacagtttaaggagaaaaaaatcctaagtaaatagaatttcagccaatactttcatgaacttcacccttctttggaatgtttttactctctaaggggaaaacagattgagtcatttatacagcgagtgagaactttactcaaaaggagtactcaggagatgttttccctgtggtgctttctgaagtcacaatttatgagctctgcaacattgtcagagaaatgttcatttccaaggaacttgtctcccttgctttctttattatttggcactgtacattttcatgactgtgaggaggattccctgacatagttatctgatgggaaagtctgatcctctcacttacaacaatgatttttcatgtctgttctacttcsctctcccctttgtaactccctaaatttcacacatagcactctgactttatacatctttttctttgattctgcaaactgattgttaaatgtgtgatatsattcttggaaccatgtgacctctgggttcctaaatgcagatgtgattttggtcttggacagcagaaggagatattgagctagaagttaatgtatctttttgtatcatttttatttttaaacttagtatgtaaacaattggtgttacattttcaaataattagacagctgagggctaaaacagttgttttggtaagtggacattctcttctttcagaggagcctcagcataaaaccattttaataaatattttctacacaggatgagtaatttcatttcgccaaaagacacaatattcactttctggtcttctctcactctccatgttctcctgagtgctcattttgtaaatgccagttatgacccatgctggatagttctctggtcgtggttgaagcttctgtaggtttgtcagcttgccttatgttacttcaaagcctgcactcaactgttcttgaagaggaatttcccttcctttaagggcatcatctttccattttggagagaacagtagaatgccacttctaagtgtgctatgtcaccatacaatcttcctcttagatggcagagatgcatgggatgtgagcaggattgctttatagctactgctaattagatctagagcatttggagggcgtttccatttggaacaaccctctatattttggtgtctagtttttttcctagaagatttattctattttttaagctgaatacaatttttgcttaaaatgttctatcctattataatggctatgccaattcagtaagtaccatcatttttcttcttgttaaattttttttaaaaaatatgtttctcagaggactattttaagctggatcgtattacattgtacctcaaattgatgaatttattttatatatagatgtcctggaattcctagaagatttcatcaattgtctttagtcttgtgctttccattatttaacagcatgcctgccagatagtggttcttaagcccttgaagctcagacagtcttaagtaccaaatctatcaagatcccctagttcaaacacagctcaagatggtgatttagcttttaggtcattttaaacattcaagatattgtattttcattatgtttactctcctacatcctggaatttggaaatttgctaagatattcccatcacaaagaattatccagcttgcttactgaaactgggtcttatgycatattctctctgaatagtggtgaaataaatttacctctaggcaagtttcttgttagaattagtaggcatgctctgtatgctttgttatgtttcacttttcaccctctcctttaaggaaagcaaaacaaaatttgtttggacaaaacagaaatttttccaatggccatgtagtttgtgaaaaaaagcagcagctggagttggattctattgtagaagaaaccataacaggagattatgccttaatcataaatggccacagtttggtgagtttgcctaaggtttttgtcctttctttttcttcactgcaataatcatctcttttgtgctatcataatgagacctcctttgtcttttccagacaaatgtcactactagatacagggcatatgcgatgatttcctgtttgcaaagggaaaggaaacttctaatatatatctcatacattattatttggatcaccacagtaaaggggaggctccaargaaatgctaaattcacagaatatcaatcttgtctaaatgactatagaccacttagcastattatttaagtgcctttctagaggggagtgttayggctcactgttacttaattaaaataatgcaactgggtggatgtattataattattgctcttactaatgtttgtgatttgtggagcacaacctgaccttcatgtaattactatacgaaattattgccattaagatacctctagtggtttttctaaatagcagcattttacagcaatgccaaacaatttgctttgattaggaaatctggttcttgtcctaatagaatgaacttgcattgtacttttaatgtagttcagattctgaatcttgaacaaacatgaaaatactcttctgagtttctaatttaaaatacaaaagctccaattacgctccagtgaaattataatttatatgcacaaggaattaatctcacatctttctctggctttgatgatcatttttcactttagggtttggacaataaatgtatcttcttgtagacagtttcttagaggacaaaagaagttgggtatgaggatattgtgttttctcccttgcgatcagctgtctgttgttagctcttagtgcttagagcattatccagctggattccagacataatgatgtgttgccttctacaccatggaaagttacagagctcagctgcaggccaaactcagttgaaagtttgtccacatgacacaaaattcctttatgcacagaagaacagtaactgaaaattacgactgtcatctgggtcttaaagctggtggcccccaagctgaattccccagagaccacaatatggaaagggaatcttatgagttatactttgactttctctcaggctcaaagaatccaatgtgtggtgacattaagagtactcaggtgataatttataccattctctctctctgtctctaagtgcattgaaagaaggaggtaagatagatgctcttcaagaacaccatcatattcaaagcctgaaactcatggaaccatgaaatgccatttttaatttaaggagacttgactatgtttttgctagtatggtcagaaagctttttctttctttctttyttttttaatcatgattctaatttgctcaaatcctgatgctttgcagaatgtaatttggcctttgttttttctcagagtcttagcatagtttttcacttgctgataataaaaaagagagagagagagaaagagaccattctaggcaagacagacaattatctgttttctctttcagaaagagtggtaatatttgaaaatgccaactcacaatttcacctaggaattataggtttgaacatgagaattttctgtactgagttatgtttttatattcatttacccatccagccattcatccattgacatttttattaagcgtgccccggtcacagtgctaaagtctgaggataagactgtgaatagaacatggctctcgttttagggattgctgtctagtgggtgagataatcacacagtggtatgacaaatactgtaaaagaggaatgaacacaatgctttgagagcacagagggagacaaatttacttctttgtgggagaatcagggaagacttcctggagagagtgatattttcaagtagaggtaatggcaagtacaaaggcacagaggcaagaaagagcccattcaatcatgaggaacaagcaatttggcatgatgggaaaaaaagtgtagacttaaaagtggtgatagaagatgaaactcaaaaggaatgcaggggccagattgatatgggctgtgaatgtcttgctaaagattcactcaaagatactgatgactcaaagtgtaagtggatttgtttcctcttaatgtgtttattaaataatttacagtaaaacattttctaggaaaaaaaaattgcacagttaattggaagggattgtgctatcttttttagtgatttcttggtatagctaaaggctcttatgcatttggataggagcaagattagaaatggttgaggaaccctgtctgtgacgcagcttgcgtgccccccttttgcacaggcctctctgggtttcagtcactatgttcttcaagggacaatccccagatcatctgcttttcattttgcctgcacattaacaatcacaacaaactaaatatacaaaacaacagtgcaaagaaacaaaaagcccatcagatagaataaacaaaacatcatcatttgtagttcattctaaacttggtgagctggtagataggttctgtcttttgttttcatcaattttaatggtttctagaacttctccagcatttaactctctctctccagtgcagcatgatatcaaggaagacatataaatggcagttttgtttatttttattttaaaattccttagtagtattttaaaatttgcttaggagttcaatactcatttctttggttcttgttgcttgtgtgattctgaatcaacaatgactttttggagtgaatgaaatggtttagcaaacaaatgaaatggttttagcaaacaaaacatttgtcttgtttctcaaccctcatttattgtttcctgttcttgtttgaattttatttttaatcatacaggctcatgccctagaaagtgatgtcaagaatgatctcctagaacttgcttgcatgtgtaagactgtaatttgctgcagggtcactccactccagaaagcccaagtggtagagctggtgaagaagtacagaaatgctgttactttggccattggtgatggagccaatgatgtcagcatgattaaaagtaagaggatatttgctcaatggggtatgctgcatacatggggtcctcagtttcagcatttggcaatatataatcactagattgcattaaaatttaattttgccagtgattctaaaatgaatgatacttctgggtccaatgctaccaccattattagtattcgtaacaaaatttctttgtctttaaataaaccatttgtgtatttttaggctagaaaaagacgtcgttcaccttttactatttgaggaagtaagtagctacggtgtagaggaaagaacaccagacccacatttgtaacatgtgactttaaccccatctttgccacttacaaattgtaaaaacttctgtaagtcactgaacttttctgaggctgattttctcttttgtaaaactaagagaaatatctatcataagtgtttcatcagataatatatgtgaaaaattataattgcaatggctgtaagttttccgtaaataaaagaggaatgacaagtttccaaaagagatcgtggctttgttttgggagtgacagtgttcctctttcctttgtaggtgctcacattggtgttggcatcagcggccaggaaggattgcaagcagtcttagccagcgactattcatttgcacagtttagatatctccaaaggcttctccttgttcatggaaggtggtcttatttccgaatgtgcaaattcttatgctatttcttctataagaattttgcatttacacttgtgcatttctggtttggtttcttctgtggtttctcagcccaggttggtaaaagcatgtttttttttgtttgtttgtttgtttktttttgtatgatattacaaatgactcttcttcatagctctttactaataaattcagagcattttttaatggctgattcaagtaatagtattacaattatgtaattgatagttgacttgagctttgtacccaagaagaatatgtayctagctggaattttatttatttattttcttatttagatagtcaaccagtgagtactccttccatgcatactttagtttttgttgaaatgtttttggtatgatgacaggtaagcttgttgtagagttttaatttagaacagaagtctgcaaatcactaataagaaatgttgaggtatctttactgggaagatggtttcttatccaacacactaaatgtatctggactgattggtactctgacatcaaagctgtttagacagcaattcatcagctaaaagttgatctatagataatgctggtaggaagaaagaaaattagcaaatgtataaattaggattctatttttatatcgcttcttatacattaaaggatagttatttaaccacacatcttcaatatcagaaaagttttgacccaatgaatcaactgtaaaatgtaatgtctatatcatttaaatatacttataaatttaaaaaatttgttaccaaaaacttaaatgtagatatggcattgacattttgaacaacaatacaagaaaaagattgtccttgaaaaggaaatggtaaccataacactcagagatttattcaattgttcttcccttctttgggtttaatcaatgacatggattcaacgatatgcatgaaggtgatttttaaaaaatcattttattcaaaaagactgaggataaatgaaatcttggcatcttcttcttacatgtgctaagggagattagtgaattcctttttacaatgaaaatacattttcaacattttttccttcttctgggaagttaagatttcttaaagtgaggcatacctgttcccattcctaattttctctttttaggataacatgccctaaactaagagtagattatgttgatatttttgccttttttttgttaatctcttgacagttgaagtaaagcagagtcttgattttagctactcagaagtagaagttatcttagtgctacttcagagtaggcgtggggctggggttatttgcatgctcataattcctcctttgtccaacaaagacaagcattggaatgtggcctgtggcttcctagtctgttgattttccttccacataagaacaaagcaagaccatctgctaacgggtgtttctaagagatctaattttcatattccaaaggcttaaggctgaagaatctcaagactatgaagggacaaaccccatttaaaaactcttagaacacagaagagtagtcagtgatttgtatttgcagacgcacaaagcttgaataggcaactgttccactaagttgtctgttaaaactgtgaagttgaaactaacgttcaatgacttctaacctctacatttaggtcattttctgggttctgataaaaatcggtcagagccagatattaagcaactagaatttttattctttcactggtatttgcattttaaaagagaacaacaagggagaacaataattgccccaaagacatgagcagcttgatggttgaacccagctgtaaggcacaccacctgtctgtgattaggtttctgaaatgtttgatttaactaacatgtttcttttctgtgtcccttcctttcccttttgtttttttacactgaaatctctagttaattgcacaatcttcattttgaatctattgttagtcccagttgaccatctgtgttctttcttaagccagtgaattgggttggaccagtggttctcaagctttagcgtgcataggaatcacctggagggctggttaaagcactgcccactgggctctagcccctagaactgtactttgagaaccactgggctagaaaacctagaagagtatcccaagttctgcttccttgaacccagaccagagtaaagtccaatctgctgactttttgttttgtcaacaacattagaccgtattcatcttttctaaagcagaggggccagttaagccaacagctgatctcccccagttgaatttttccagaggatttaaaatcctttcagccctcttgtcagaccactgtccctgaggcatattttacctgcgctaagacagggccaggtggaaaagggatgtctgttcatggtacaggatttctttccccagtttagccagtctattatatcttacctagcttaaccattagctccttgaggaaaagaagtacatctaactcatcgatacatctgtaataaaatcttgaatgttacctgccatatagaaggccttctagtcatttcatgttggtgggtgtttctatagtcctttcccatgcttgaggcaggtgcagcaaagagagccattccgacgtgcctccagtcactcacacagttgccacttactctacccaccccaggggccatccctgcaggctctggatctggtctgtttaaacgtgtgcagcctgatcaccactgtggcaaaggggctcagggtcttaagatctaaatgcggttatggaactgatttcagaatatggaatgctgtttttctcagttgtgttaatattaatatgatacaatagttaattgggctacaggtgatacatttcttagttatttatacatcctttcattctaggaaagacatagagtggattttccaggtgttttggctggttcttgtctgatttaaatagggcaggatacctttttttacgcagaggagcaatcaccatataaaaataattgggcctctgaataggagtcctggactgctctctactttgccccgatttgtacgatgaccttatcacattgggaccaaagcttatactggaaagggtactttggtcccactatttaaggatttcactcatttaataaatattcactaagcctttgctctgtgtcaggccgtggtgcctcctggaccttatgtcctgggtatgttaagaagtgtgctcttgatgggcatggcaaagtgtgatctgacaaattttattagctgttcatgttgtggaaggtttaaggttttatatccagacttgtcagagaagtagataggctttccaggagagtgacaagtagtaattgcttatcacctgttggagaggagaggacagccagtcagtgacagtacccatgtagtggcatcaatgctgtggggtcagcttctttgtagaatcatgatattgttgacactaacaagcagggatacaaacaagttataattatacctaacatttaaatagtacttactatgtttcaggcattgtctaaatgttttacttttattagctcagtagttacaataaccatatgaagtaggttttacaatcatggtctatattagcttaattatggtaaaaaacacataaaatttaccaacttaactacttttaagtgtagagttcggtagtgctaactatgtacacattgttatgtaacagatctctaaaactttttctttctgcaaaactgaaactttatatccactcaataacaactctgcatttcccctagtccctggcaaccaccactctactttctttttctatgagttttcctactttagatacctcatataaatggaatcatatagtgtttgtctttttgtgacatgcttatttcacttagcatagtgtcctcaagatccatccatgttgtagcatgtggcagtatttttcctctttttaaggctgaattgtgttacattgtatgtatatactacattttgtttatccatgtatccatctatggacatttgggttgtttccacctcttagtctatatcagctctttgttcgatattttctaaataataatatttgggagttctactgtccagtaaattctatttcttcccactctcacctccccatcttctctcttcaggcttaaaaatttacagttcacattagtctgtgaattgtaggctctgacaagtccaaatgtaaagaaacactactatatttgactccaagatgcatatacatgtattctcacatctgacatctctaagacttggatatgtctttacaatcaaaagtatattacaatatcctttgatctgaattgaagtcaggttttccagagagcatttgtgtgacttcatccagttccctgtgggcactgctgccaacctaagatctttctctttccaaagattttttgaattcagattgcagattctagtgaataccagcttgtggtccaagttttcaagagagattttgtctctccctttagttagtgcaaagttgacgtaggctagtttccttgcagtccctttctgcatgaagatttctcttttacactgaggatgtagctctttgttgccctagctttatgggaatgttagagtccccatttggttgaattttggcattgataatggtatttcttacaatcaattgtgctttagagtcaatgagatttggtattattacccaaactcattttgcatggaacgctgctttttctaagcaacacatataatgtcctgtagaacaggtgccatatggagctcactttgggacattgtggaatggatgcttctatagcaacaatttcaaaacttgacattgcctcactayttatcccagttctagtgttttgaaaacaataagatgtacaaagagcaaaatgataacaagaatattgtccccataggaacaggctctttatgtttctccctttacaaaaacttccattttaataattaactctagtccaagggacaaaatacccattttatatatcaaaataagggtttacgtttaaacttctgcaaagtcttttccattattctcaaagtttttttcatcttataaaaatatttgtatgtgaatatatctcaacttttatactactacaatcgtattcttttatagctttcttattaaaaacacaacttgtcacactttaagaaagttctcttgatttacattcttcaaacatgttatttttcttaatgacattctgaaacccagattataaattatttaactattctgagtctatagacttttaagattttttttttttttttttaggtgagtcttgctctgttgccaagctggagtgcggtggtgtgatctcggctcactgcaagctccacctcccaggttcacacgattctcctgcctcagcctcccaagtacctgggactacaggcacgtgccatcatgcccaactaatttttgtgtttttttagtagagacagggtttcaccatgttagccaggatggtctcaatctcctgacctcgtgatccccctgcctcgacccctcaaaatgctgggattacaggcatgagccactgtgcccggcccaagatgttgtttttaatttaataatttctgtcttcctcatctgtgagtcacatgacattgtcaacttgctaatagaaagacttgcttgctatcttgggaagagaaaacaaaataatgaaaaggacaaactcttgcccacctagaactggtttttctcattgggaaataaataagtgcataaatcagtctaatacaaatattgtatttagttgggtgcagtggctcgcacctgcaatcctagcactttgggaggccaaggtgggcagatcgcttgaggtcaggagtttgagaccagcctggccaacgtagtaaaacttcgtctctactaaaaatacaaaaaatagctggacggggtggagcgtgcctgtaatcccagctacttaggaggctgaggtaggagaatcgcttgaacctgggaggtggaggttgcagtgagctgagatcacaccactgcattccagcctgggtgatggagcgagactccatctcaaagcaaacaaacaacaaacaaacaaacttgtatttaaaggtaatttgaaagcatggggaaaggagaaatgtgtgaggatctaggatgacttaggaggatctgggatgacttaggcacaattagtctgcaagcaagtgtatgaatattttaaaaattaagtggagatctgaaggcctgaaattctagctcccttcagggatttggggcttgatttgcagaagggtatgagactttggagtaaaaggaggacatccctcccctcatacactttccaactgacctgtaattagctaaaatcttgtaatttctaaaattctgtttaacaccaactcattgagaaatacctttcaaaaacttcatggcattgaatggggagcttacttagcagtattgtctatagcaagaagcctgttctagagcaggtgttctaccactgtaaagctggaaactctggtgttccccagccacaccccacatgggagtggcctggcatgttcgcggtattgaagactggctgtgaaggtggctcggatttggaattgggattggcagggatcattgtctcttttccattccctgtttttcactggaagggcctgattagcaacaggtttaactgaaaaatgttttggcttttttttagtcctgtttttctaaggacaatatgctgtaaatgaggcaagtgaaaagaaaacaacatatttgtaagaactacagagaatgagaatttttgaatgggggacagtttcactgtcatactctctcacttccccgttaagatcacccaacatgtggctttggcctccaacaccatgtgttgggtgatgagactttcttagcccctaaagccccttagatagccacttacttccagtcttttaaagaaagtcagctgtctgaggtcttcccactccctgccacccctctcctaaactgctttaacaggattgaaagctccatagtgaaatggagccagtagtaataactccaaggcctggcagatttggtaatagccagcatctctttagaggccattcctgggtaggcctaatcttccatcactttctctgtccagtcctgacagcagtgagaytctcacacatattgtccaatgcagaacctgtggtctgaatgcttgctcatttaccaacaataaactgggtgccaatttagggccaggtgctctgatggccccccaggaacaacagagtgaatcaaagggatgctgttcctaccctcaaggaacctacagtctgggaaagattttattttcataaatgcataacaaatgttgaaaaatcccataatctcctttcttttatttctctaccaaaaatttcttttggaataaatttactatggataagccatgtcttggggccaaccctgtcaaatcacagcatgattcataagcgcctaaatattcttccgtgtacctctcaacagattgtttggaagtaatcctttcttcagctgaaaacatctgaccaaatgtaaacagattgtgttttttaagacacaatgttgactttctaaaacaccagcttaattatttaatgaagtgacatgtgctgtttctttactacatcagtctgcctttggggcctggtggattttatccaggcaattattatctgatgagagctccagcagattccagccaatgccccatcctggtaggtgggctggggcacatgtgtaggcaaatccagctgtggtgtgcaaggcttcaagaaggccaatgggtggaagcattactgcctgtgggatggtggcacttaggacatctgtgatggatggtgatgtgatgtagtctgggttgtcgttggtttatggactttcctctggttaacttcagtacgttgcttatgttgtgattggcttgagatgtacagtgaaaagaacccgcggaccagactcccttttgtttcctatgttgggtggaatttcctgggagaagcagcgggaacaaagaacaaaaagtatgtatcttgttgaacctagaatctttactctggcagagaatttcagggacattgagtccagtccctcgttttacagaggaggatcctgatcctgcaggagctgaggatcagcggtaggcaaggctaggaccggaaccaagtctcctggctcccacttcagcgctctgcctactctacctgatgataagtgacctcttgggttgtcataaatttggaaaagctaatggccatatccttttttttttwaaaaatactgtcttccctcaacccctaatcagaaaatgtttgctttatttggaatctaaaggagaaatatccagaaacactcagttcaatatgactatgtggaggaaatgagctctctattgaaagagacctcatgacttgcggggtgtgtcatagcttagagctgtgggagggacaggcctgtccctaggygaactgtttgtagaatcatctggaagcttgaggacaccttctgctggcaaacgctccaactcaactgccactgagaaacaaattaaatataatttgttctaatgagatttccagccagatttctggaacagagaggtttggataaaggagactaggtctctaaactgaatcatggattctttttaaggacatgccttatcccaatctattattgaaacccacatgagttttgtggcatccactgtgggtttggattcacaatttatacctgtaacttattttaaaagcaccctatgccttcaggacttttcgtaaagaggaactgtcccctaccaaggatacagccaaataaaaaaaattggttgaagtcctatttagaaaattcatgcttaaaattatgcaactactggtactgtgtacttgtgagatgatattatctgatgacaatttatcattgtcagtgagatacagggctgtgtatwttttttttcttcaattctactgtgatatggaagcaattatcttgtcaaggctggaaaaactttagttctgtcaaacagtataataaagcaacaaaaagtttggaaagtgacgtgaaagactgcgactaatcttaaggctttgatgacttcatggatttggttacctgtgagcccgtctccacctggcatggtagctctgctccccctcaccttccagatgtgctctggggaaagtccaggactggacgagtgctcaggcctgggtcactcctcctggatgctgcgagcgggtttttactaattacacaaatcaataacagatgtgctgaggctgagcacctcatatttattccacaatgtgttttctttaaatgacaaatgttttttaaggcccccaaaaggtcattagataggtttcctctgcaacacataggaaaagggggatacacatctccaaagaggtagtaagttcatcctgttatttgaacaaggagctcagccagtggtcgagcagaaagagcagagaaagccctttgcagctgtttaagaactttattaaggtttatttaaatgtgtcattctataaatcataggttttgtgttctccaagctgtttttagattgtaatttgtagctggagtatttttaactctatgtaaaatggttgataaggctgataaattgctcccataaagaagggagcgaggagctttccttaaatagaaaaaacagtgaagttggaaaaatgaactctcctccctgttttttttttttctgatctgtgaagagacacttataggattttaaacagacttgtgacatcttgtagtagcatggcttttctctcttgttcagagtattggagatagggaacaaatattttggaggcagaggtgccatggcttcccctgtgagtatgggtgccctagggaaaatggttttttgtgggactccttttatataaacaatttgagtcacccaaaatcagagtgtcgacctagaaatctgaaaagagtcatcatccctcaacctccaccctgcccctctcttcagggcatctggtcaacctgtgttgggtgggttgggagggaagaagaggtggtagagtgcccgagcatgcttggaaggggagaaacagggaggttgatctgggctcatgtgcccctctcagctagtcctagtcaccagaagggggccttaaaatttttccaaggggatctaaggaccacaagtagaagtggggcatttactagaataactattygagtagctggagatctcttgcaaggattcttcaacagaaacctgttgtagaagaaacattgcttggccaggaacggtggtttatgcttgtaatcccagcactttgggaggtcaaggcaggtggatcacctgaggccaggagttcaagaccagcctggccaaygtggcaaaaccccgtctatactaaaaatacaaaaattagccaggcatggtggcaggcacctgtaatcccagctactcgggaggctgaggcaggagaatcgcttgaacccagggggcagaggctgcagtgagccgagattgtgccactgcactccagtctgggcaaaagagtgaaactctgtctcaaaaaaaaaaaaaaaattgcttgtggccttaatttctgtgaaagaccctgaagtctaaactgtgctaagccaatgcccatatggcaaagttggtttctaaggtaaaggactcaggttaacacattttggtagagcctgagataaaaaccagaattagagtgaacagtgattgaaataattaagtattcatgaagaaagtaattgtaccaaggtactcatttttctttaaatcttgttctgatgttatattgatctcatggctaccatagtttattatagaaataaatatctatggttaattgtctcaataaagaattctatttttataaaaatatgattagcatgaaaatgtacctttttatttacccattaaacacatctcttgaagcttggatccctgcatgctccccccatcctccctcctttcttccttccataatatggtgctcacttattgagcagtgtctttcaggtgctgtcgtggcatttacctcatttcattgaatgctcacagcctccctgtaatcctcattttatagcctaggaaaccaagacacagagagattgagtatcctactcaaattcacacagttctgtctgccractcccttacccttaagacaccagcttccttttattgagcaggttctgagtttggttcttgggccccacgggtgagttagattacccgctctcaagtagctcacagtctagtgagacagggctaggaaccagcatataaataattgtaagtcagtagttaagaagcagtgaggtataggggcatcatggaactaccgatgagtggtccagaagccactcatggaggcacggagtggccaggactcagaaaggcttcctggaagacctgcccactccccctcccatgctgacccttccaggatcaaacatattgaagcagatgagaagtaagaggatggacatcccagcagaggagacaacaggaggaaagttccagaagtgaagaatagcttgggcaggaacacaagccatcaggtatctggggagtgatttgatatggggtgttggggagagggacaaatctcagatttctgatttggatgctggggtggatgtgatggtatcagatactggtatagggaacccaggaggggcgtctggttaaggtaatatgaggatgagctctggtcttgatatattaagtttgaatctatggtgcatctatgggaaaatgcctagtagaaagttaaatatgtagcatttactaaaaagttgtaaaataattaattcaacaagtatttatagagtacctacagtcaacaaatatttgtagagtatctaccaatggctagatcctgctctgggcattaaaattatagttgtgagtaaatttctgttttcatggagattatattctagtgggatgaagacagataataaagacataaatcagtaagataatatcagaattgttaagaaagaacttggtaatgtaaaaggtstcactgagagggtgaggtgacactggagttgtgacctgagtgttcagaggaaacttccatatgaataccttgggattaaagtgttccaggcagagggtacagccagtgcaaatgtcctgaggcaggaatgagccagataagttggagaaagcccatcagcgaagcctcagctaggtgagggagggtgagaatgttgtgaggtgaagttgaagagtctggcaggcaggggaccaggaagggctcttaggacatgacgaatagggagtctggattcattccaagtaaaatggaaaaccattagagggttttaacccaggtcaatgctaatgttgttattttaaatcagtggtccccaatctttttggtaccagggatgtttcatggaagacaattttccacagaccagtgggggtggttttgggatgagactgttccacctcagatcatcaggcatagaactggcatatgcacagttcacaacagggttcatgctcctatgataatcttatgcggctgctcatctgacaggaggtggagctcargctcgcttgcctgccactcacctgctgtgaggcctggttcataacaggctatggactgttataggctgttggggacccctgttttaaatgccaaaaaatagcatataaaattgtgtatgctctcaattacattaaacaaggtgagggaaaaagccttcaaggaaactttcttttttttttttttttttctttttttttggagacaggatttcacttctgtctcccaggctggagtgcagtggtatgatctcrgctcactgcagcctctgcctcccacgttcaagtgattctcctgcctcagcctctcaagtagctgggatcacaagatgcacaccatcatgaccagccaattttttgtatttttggtagagacaagtttcaccatgttgccaaggctggtcttgaactcctgagctcaagtgatccactagcctcgacccccaaagtgttgggattacaggtgtgagccactgtaccaggccaaggaagctttccaaatgacaccactgattgagagaggtggtttcatgtagtggtcagtgttgtgggcactaaggttcataggcttggagttagctctgacacttgcttggctggcgttctcaaactttgtgatctcaggaccccactatcaatatttattatcttaggaatgaaaatgaagaaaaaaatctaaatacttttattaatttgttaaaaaatagtgaacccatgatgtgtttacaaaatgattgtattttccaaaacaaaaacaagttaatgagaagaatgccattgttttacacttttgtaaaactagttaacataatagaagacacctgggttctatatcatctgcattcaaccagctgtgatgtcacatatcatacagactcatgagagaatggggtgaaagggtaaatacataactttttgtattattgtgaaaatagttttgacattatggatcccctaaaaggttctgaactatacttggaaaacctttttttcccctttgggtttttttttaatataatttaaaaaaattgtgggtacatagtaggtatatgtatttattgggtacatgagatgttttgatacaggcatgcaatgtgaaataagcacatcatggagaaaacctttgcatttaaggtatgacattgagcaatctcctaaccttgataggcctcggttttcccatgtataaactgggaactatcaatagtacctaccttatgtggttgttaaaatttaatgagccgatatatgtaaagcacttaaaatggcacagagtagatgtttagtaaatatcagctatttttatttctttttgttattgtgacactgagtggcagcaaaacttctgagaatttgcagaaactcattgaaaccttactctgatttttccttcctgtcttctcttgctccagctgtgaaatgagtcttmaaatctgagtgccggttgacaaatgctgatagttgtcaaataagtgtagcttgtaatgcgagcccatttgtgatgatgagggcacgctatgccagactttcagctgtccacagttgagtacgccataatttctcagattctttctctcttcttaatacctggaacagtcagatgccatcatcaatgagttgaagatttgtgtcagctgctctgctttaaaaaaaaaaaaatggaagtgagtgtaattcccaatcttggcttcacattggaactacctgggaaaaatttaaaatgaccaaaacttagatccttctcccagagatactgatttaattggcctggggtgtggcctgggcatcaggatttttggaatcttcctactctctgaaatctcactgggctataactataaaagaaggtcacgtgtttaatttttaaattttttatcattggtaaagtttaacaaatatattaaaaagtatataaatatcagcttaaattgttgtgaaatgaacacccatgtaccatgatccagtgcaagaaatataacatttccaaacacccaacagctctcctgcttttcctcgagacctctttccaatcctctagaggtgaccattaccctgccatcttatagtcacatttcttctgttttataactttaccatatgattaggagttccgaaacaacataggaatagattttcatacttttgcactgtatttaaatgcaattatgcctttgcatctggcttcttttgctcaatattatatgtagtttttattcatttgttttgggatatagttataattctttgcttttcattattctatagtattctgttatatcgatacatgataatgtctttatcccacacttgaaggatgttttggttgtttttgtttggggactattatgaccaatgctgctatgagtatttttatatgtatcccactgcacgaagatagacatttgtgaacatatgtatctagaagtagagttggacacattcactcatcagaaggaagataaagaggcttagctgcagttttggtggactcttgagggtagataggagttggatactgggaccctgtcacaactgctgctctgggctgggaccctgtggggtcgcactgctctgaaccatgtaccttgggaatgttgataatctacaggaggcaactgacagattgagctgtgccttcagtagtttcctgggctgaagggagaaggttcagtgcctatcgagggtagagatcatgatgaaacccttcctactctgggctgggacccaaaggcagcctcccagcagtgaggtcacagactctgccatagcaggacagttggctagcccagaaaatatcaggccttcgttctgtcctcgacagctgatagaaggaaataaacatagagtctggagaaggatcgcattatcctargccttgagatagttattaagttctaattctcttcttgatcttgacaagtcattccccactgtcttgttagttcattggtactttgatgaagatgcatttgtttttttctcaacttttttcgttatcttcagcaggaggtttggtatgaatcaattattatggcacgtgccccctatcctgtgtgataaattcaggcttctttcagatacctctgctaaatacccaggggggttccagggagtgccagccagcttttccagtctgttctcatggttgcctgactagtggactactgccctgcccttctgcaggttctctcatgccacattgagtgcattatccttcaggtagctgctgcaggttctctcatgccacattgagtgcattatccttcacgtggctgcagctgtcttgtatcactttgctcccagcatggacctaggctgtggtatcttggaactggcccatactgattcacaagagctgattgttaaattttcatgaattttgtgagccagtggttaaatacagccattattaaaygttatataaatttacaatttaagttatattaaaaataaaagacagttaatatactcaaaatgaatcccttgctaattattttcccatgttttactatttatgctcttgagattatattgggtctgtatagtagaaatactatataatggtgagtatgtctcaactccacattcagtggcatcattgcttgaaatcagtcatggaggaatatttataccatggaaattggcaaatgctacaaatcaaggcttttttttgtttgtttgtttgtttgttttgagacggagtcttgctttgtcacccaggctggagtgcagtggcgtgatcttggcttactgcaacctcagcctctcgggttcatgccactctcctgcctcagcctcccgagtagctgggactacaggcgcccgccaccatgcctggctaattttttgtatttttagtagagacggggtttcaccatgttagccaggatggtcttgatctcctgacctcatgatccacccgcctaggcctcccaaagtgctgggattacaggtgtgagccaccacacctggccggcttttttttttttttagcctgttgttaaacatttatcagcatgtcattggatatagtccccctttctaaatccttacagctgggtttagaccacataatgaaaataggaatcagagagtaacaaaggagagttaccatgaagagaacttaaaatttgttattagaaatagttattctgagtcataagctttcccacttccaccattgtcttcagtttcttctcagcatagcatccagagtaatcctgttaaaatataaataagaccaggttgctcctttgcttaaagtcctctaatgtcttctactttcacttaggtaataagccatgtttagttacataggattgttcttcttacctcctgacatccattattcttcctacaggtcactctgctctacccaactgggccaccttgctgttctctgagcatagtggatgctttcttgccttagggttgtttcatggggcctacttgcagtatagaatgctgcacgtcccagcatttccagctgtttcagaaagctgcatgttagatccatttccttcaggtcttatctcaaattcacttctcagtgagactttcttcaatctgctgtattacaattacagccctcccacattccctatcccctttcctctctagcacttactaccttctaactaattaagttgattttaatttttgcttttgcccataataagctctgtaaccgaaaggttctgtttccacaactgtgtgtactcataggcaaaatggggatatatgcctgcttcacatgcctcattgacttttagtgaggcccatgcagggaattcttgtgtaattagtctacaaaggtgtgaggggatatttttgttgttttgctatttatgcccatcttgctttaaaccactcccccgcaaaaacctctccattttaacacaggatagaaataacaggcttattactatatttatctctgaagattttagtgaatcctttgtttaccacttggatcagataattggactcattataagccactgaaaacctggagaataaaatggcaacccaccacaaggtcaggggctcatacgtgtcccgcactatgttaggggtactgctgcatgtattattttgtcctcactgccacactgcaggaagggtatacatcactttagagataaagaaactgccrtttagasagatctagtatcccattaaggcaccagagctgataagaggcaggtctaggaaagaattcatatttgtctgattccaaaagtcaactcccacccacctcagaaaacctggttatttaacctaaatgtgaatattctcactactatgratgatgtttctcacttatatgttatatttcttttcagactgtttatgaccagtggttcatcaccctttttaacattgtttacacatcactgcctgttttagccatggggatttttgaccaggtatgttttttttccatctttataacttagtttctcttttatgccttttagttttttgtgggttctaagtagaaaacacaattctaagtagcagccctaggaatgcagttgttttagttgcttttgcatggatcacacatgcttccaggtccactgtgcctcccttacccctataccctagcttccccaaaagcattatttgataaaagttggttactcttctcttagaggttcacaccccatagattgctctaaaggctctagaagtcctgtacgaagtaatctctttaacttcattttaacccagcatttcccaaacttctatgactgtatatgttttcatatagcacctattaattaatatgtctcagaactagtgtctgtggttcacacacggggaaatgctgccttagcctctgagagcttataaagaaccatgcaatgatagaaaatcatggggctaggttggaacacagggggctaacacctgcagtgagactcccttgttgcgaacatctgcagtgagacttccttgttacacacagcccagaacaggagccacagaccagtagagcagtctgccagtgggagaggaggatgagaagctccatggccaaggaaagaaagagcatggatttcttttgtcccagcatcaatgtrcttgagtggggagaaaggagaggatcaatcacaaaaatggtagatccttggcatactcagagccttggaagggacttcctggaaaggggaaaaagtctggctgcctgtgrggaagtgaaagactagccagtggaatttccgtggcacaattagagtgtcttatttttaaaaagactttttgttttttaaaaaagtatttttaaggagaccacattttctccaggctgttgttagacctatttgctaggcctcattttctgggccaaagccgtctattrcaaaatataaatcttcacattatgagctcactccagtctcccatttggctrgctttgtagtcagttgttaagtctcccttctsatatgtaaaaagggcagtttgcgaaaggcatattttctggaattatacaaaaaagtaatgaacttctgaagaccttagatgtaaaggattaagcacattcatttctcagcrcccatgtttacaagtgtttcttttcttggagctttgtagctgcccagaatgtggaataaaataataaaaataaagcagtttctgggaaaagatggttattgtgcaattcaaaaaaaatataataaggcttcctattaccatcaagttgagtgtctgctcctctctcctttcctgctttgtcaaccttggcccttaaactgatcacaggatcgtggaatgctatgctggacaggcctcagcaatcatcaacagatctgctcattttttaaggcagaaaccaagccttggagagtcatttccctaaagccacacagccaataagtgacacggctaagactagaaccaggcctcttaactttgaggttgctacattattgctattgttgttattatcattattttattaattgttatttatagaagcatctggcatatttattacttacgatgtggcaagaactctactaaatactttacatactggtttaatcatggcgatagttccatgtgggaggtgttattgtttgcatttctgggcatgaggaaaccaaggctcaggcggattaagtaacaggtttaagataacacaccagctaaacccgttaccagggattgagctcatgactgtcttgtttcaaagcctgcgcacataaccctcagtcactgaactaggggaacaagcatccaaaagcatctaaaaacaggactctctaaagagaatatgcctgtgtttttccatgggactctgtttggagagacctgggccatcccacaagcaggaaggggaatgttcctctcccacaatagttcaccacctgtgttgcttccactttcgcctcttctcctccacctgtggtcctctgatgtcccctgtggttgattcttgccatcctttttggtttttggcatttggctttggtgctcactgtggttatcagcattactttggagctggctggaaatgcagtcttgggccctcagccctattgaatcacaatctgtttcccaggcgatttgtgtgcacattaggtttgagaagcatttagtttctcttgggacctggttggtgtcaaatgtgccaccttctcattctgtctatattctttctttgtcctgaacacctggtaactgctgttaaaattctcactgggtaggatcctcatcccagcctccttctcacctggaatcccaaatgcagtttccccttttccctgctctcttcttcctgctcacttccctccaaagtcatgagctctgatttgacaattctgactccacagctctctgctgtcatctcctggtcactaccactcactaccttgacaattaacttctggggcccattggctgcacatgatgtgctggaattctgggagcacgaatgcttctgacagcctgcaggagagtgtaggaaagaaacttcaatttgaagccaaatagctaggctcaaaccaagccctggttctgctacttacgagctgtgtgacctctcatgaatctctcttggagactcaagctccttctctgtaaagtagagatcattttattatcttctggtttattgtgggwatacaaacaagataatgtcctgttctggcccagtgagtagtgcattttaggacatgtttaaacaggcatttgctatttctgaagatagggaatacaaggcctctctgactctttttaatccttctccactgaaattacactctgtttacaggatgtgagtgaccagaacagcgtggactgtccccagctctacaaaccaggacagctgaatctgctttttaacaagcgtaaatttttcatttgcgtgttgcatggaatctacacctcattagtccttttcttcatcccctatggggccttttacaacgtggctggagaagatgggcaacatattgctgactaccagtcctttgcagttaccatggccacatctttggtcattgtggtcagtgwgcaggtaacgctgtcggtgtaagcaccttaacttgatgggtttacaacttttactatttcattgttgattgattttgtctacttgttggggggaaataatcctaaaggaatactggggctgtccttttaagtacacattttgagatgaaarcaggaagctttaacataaattactggggagaattagcattaggcgtctgtaacatncatgttagtagaaacctcacaatgtatcacttctttgggttgtgcattgtatgtaaagagaaatgattatactattatttccttcttgtatttgaagaaaaaaaaaattccaataacagaaggagaaactttcccatgatttctttaagacttaataactgccaggttttaaagtgagatctaaagtttgcttggcaatacatttctatggagttattcaagaggttcaatgctatatctgtggcatatccgaatctcacactcagaggagctcttctggtggggatgattttttgaggttccattgaccttcttccatcttgagttgtgtctctatttcctttttactgtgaatgtggtcaatgccattagatactgagttagagttcacaaaaacttttatttcttgagaggaggccttgctatgttgcccaagcttgtctagagctcctgggcttaagtaattgctcaccttggcctccaggtggctgagattataggcatgcatcaccgcacatagttagaaaaacttttcctctattactatctgtagctccgagtaggtacagcaagctatgtgacctctgttttattttgttgtcttttgattactgagcaaactgttaataattaggtgatcttctctgtcatgagggtacatttccaattctctggattctccttccatagagaagacagtggtggggtgtacagggacatctttttagtggtaacagctgattcacctctggctcagacctgttcctcggtactccaagagattatttgaaaggtagtaactgaaataaaaggccactatctgaagaagcagcaaatagaaaacattcttcatactgtcctgttaacatgatctgtttataagtaagggtaataaattacctggaagagtcattgtaggtgtgacatgtaacaagcattaaatgtttgtgtgtatgtgtgtgtgcatgtgtacatgcatgcatgtgtgtgtgtgaaactggtgttcacaattaaccctacaatttttggttaacttaatctttataattttagaaaaagcctgctgttatgcccatgcatctttttctctttttttttgcttgcccataatttgttttatgtgctattacaatagtgccagtgccatgtttttatattaactttatgtttagaagctgtttttctcataaaacatacagttcttattccagttgaatgttgaaatcacatttctactttctcacaagttgagagcccacagaaactatcacattttaaaaacattgtttagtcacgaaaaaattacagaacttcaaaagtttattttaaaagcttcaagtgacttcttgtcgcttgaagtttttaaaataaacttttgaaatttctaacccttgattatccaagttttataagaatgatatagaatgatatccatgttttttcagagaggattcacaccttaggctcaaagtaaccattagcccctcattcaggatgttttgcaagaggaaatccaaatccatttgcttcagaccttaatggccatttgtctcttcaaaatctattctctgccttccatctcctcaaggacaatagtggtcctagccatccctccaatcccattactcacacgccccagccacactggcttttgttctgctcctggaattcaccagtctcttgcttgccttatggctttgctctttcctgcctggaacattcttctctcagtttccctcacatgtcatttcttcagaggggcctccctggatccatttaaactaaggcccctttattttctctagtggaatagaaatcaattattttatctcatagttgtcatctccccttgtaagtacaaatttagtggtgtgttctctcgtttaatgtctttctacctcctagagtgtaaccttcacgaaggcagtggaaatgtctgttaatcgctgtatacccagagctgagcacatcacctgttagtgtgacacacaatggatatttcttgagtattgaataaatgagggagatgttgagaggaaattctcctgctactgatcctgtcataacaagagagttcatctgggtgtgtcaagttcctaggaaagaatcattataactgatgtgtttacagattgtgttgacagttttcaaatgtgcccaaagtttccaaccagtctgagagagggtcctcctgtgctgagtccagcagaatgacccagctgtgaaatgtggtatggggaaaagtgagagattttagatgccttcaaaagcaaggcagtgcagggagagtcaagtactgcatggcctcagaaggtgggatgtgctgcggtcgccacacctcctgcagccaggcagaaacttaggccatgtatgtacctgtggagcctctgccctaaaaacacaaaatccttttagtcttattataaaaggaatacattgcaggaaattcaagaaaagcataaaaatgcagggaaaaattaaaattcacatgtaatcacaaatcagggttagcatgaaaaaaatggaaatcggattatatatatataattttatgtcttattttttcacttaactttgtgtcacaagcatttatcttatttataaaatattctttgaaatatcccttttaatggctgtagtattccaccgtatgaatatgccataatttattcaaccatgttgctgttagattgcgtctacatttcactatggcaaatkatacaatggcaaagtttcatgtagtacataattctcagcatgatcctctagttattttctaaggttatctccttaaaggtgggaattctgggctagaagacataaggaagtttaaggcacttgacacatattgccaaatggctttccaaatagattgtatcattttcagctgaagggtgcaaattacccttctcagcagcccttcactgatttagagtattactttgaattattttataattaaaaaatggataaccttttgttgcttgggaaataatgaatacatcttgttcaaacaggaataatttctttaaaaaacttttaatttcggaataattttaaatttgtrgaagagttgcagatactgcaaagacagttcctgcataccctcacctagcttttctctgatgttaatattaacatcttacctcaccatggtgcatttgttaaaactatgaaattagcattggtataatactattaactgagccacagatttgattcagatttctccagtttttccattaattacccttttctcttctaggatccaatccaggatccaatccaggatcccacattgaatttagtggtcatgttccttagtctcctcccatctctgacagttctatagtctttgcttgtctttcatgaccttgacacttttgaagactggtcaccaggtattttgtagaatgtttttcagtttgggttttctgatgttttttcttagaaatagactgaggttgtggatttggggaaagaatcacaaagagtgatgtgttcttgtctcatctatcagggagcacatgatagcaacatgatttatacaggtgatgctaatcttgactacttgcttacaatgatgtttttcaggtttctccactgtaagctgactatatttccctttccatactctagtgcctaaaagtaagtcgctgagtccaacctacattcaagagaaggagaattaacttttacctcctagaggaaggagtatcaaagaattagtggttatatgttaaaactgtagcaggtgtaattttaaataaaattgctataataggggccccaaaggtataagggatttgcccaagatcacacagtgacaacattgcaggtttagcactaagatccaacagtctgatttcccaagtcgatgttctttaataaaggcatctgtgattattctgttaaagatttgaggcaagcatttcctacagcacaattattactgggctttgggtagttaggcatagttgggaagcagtggaatgtaatcctcatcattgcaatgcagacagaaagtcgtgtactttaaaagaggtggtgctgcttgtcacccctctgtggctgggatcactttgccacgttacagggttgaagttccctataccttatccatatactcccagcccattgttttctcccctacctaatttctccctgccctcactcccagtcccactcccaccattaattctgagtgcttgagggcctaaaacagctaggagattgaggataactttctggagaggaggatgaggttagaaaagatccaggctagaaatggtggcctagaagcagaatgagtagaggcttccagtgtctggcatgctttggttgccactgcattcctaacggaaaccacagggctaaagaatacaggggcaaagggatatgaggagagaggttgaaattgagcaaaggaagtgaaaataatttggttgtgttatccacctatccttcaactctgtctgtcttaacctagatgaccaaagcaggcctgtccttgatggcagctgtaagagacctgtatcatcatcaccaccatgagtgataccatgcattatacttgctcctcatgatgccattatgcagtaaatattatgggctgcttttatagataaagttcagagaggttaaatgacttgcctgaggtcacacagtaagtcccagagccaggagaatccagttctgtctaattccagtgttatctggaacaaagtctacagtgagactggttaaaacacaaaattttcaagaaatatgagaacaaaccttatactgagcgtaaaggaaacactggatactgtgccatatactgggataatcccattatctcatttaattatctttatggtcctatgaaatgtaagtactattaccaccattgagaaaacagacttaacaagaagattaagttatattccaagtcatacaaaaagtggtaggccaggatttgaacagaggtcttctaactccagatgcccagctccaaagctacgtgaacctcccttctttgtaaagataagtagaagctgtgggcctccccagtcacataktaagtacagggaattcgtggtccccacctctctcactcatgtgggaatacctaggataccagtatcacccttggctaacatgggagacaaacggttaatagatgacaagcacataggtgtttctttcaatggcagagtttcaacttgaggaatatatagactcccagcttctgtcatttcagtctaattctttggcaaatattaccacttgtttttatttctaggaagccctgaaaatgtctgttttaccataccagagttcttagacccaagtatgtaaatgtttgtaaccatrgatgctaggcaattttggcttcaatcaatcaaaaactgtggtctttaatatatagaataataactttaaggaattctgtgaataagctcactttgacagcagcattaatatcctttcctcactgtttaagcttgacttttcattgtggtaacaaccccatgaaatttccatggtctgtaattacagttataaatcttatgtcctgctgatgctacaggccaaatttaagtagtctctattgtttttttaaaaaagtatttttcaattatttgaattataaaatgctcttttaaacatttcaaagagtacaaaagtgtttaaaataaaatgaaccatcttcctttccttcccttctttaactactatgatgatgaccatagcttaaatcctcccatacattttctgtactttgagacgacgcatacacacatatttaacaaaaggggataataattatgtatactgttctgtaatatgcttttcttgcttaactagatattctggtcagctttccaaatcaacacattcagatctatcttaattgttttaatagctgcacagaaattcataatatgaatgtataagtatttatcatctattgataaacatacaagatgtttctatatgttttttgctattaaggcaatgctacaatgcatatattagtacatatattttatatactgtcagataagttcctagaaatgagacttctggggttagaactcctaatttttaccaatctgctggataaagaatggtattttgctgttttcattactgggtcagagagtatgtacatttaaaattttcataaatattgccataatacgttctcaaaaagatagtagttccaaatgacagacactttaaaaatttaagctaaaaaaagagctttattaaaacatattaggtagcttcagtggaaacactgctgttattacaccttacagcttggttgtcatcaccctggggacgggttgccaaaaggttcgccatagacttccagaagaaccatcacctttgccatcatgtctgtcaaatgctgagaaaagcatattaaagtttgccattgtgattatgattcctattaagttttccgtgtgtttcaaagagatttttacctcatataatttaagctatatctttgccacataatggtttctgattgttaatttttctttgtagtttttatcttttttcataataaaagattcttaagttttgtatttttatattagttttcttctcttgcttttttttagtttacatttgcctgatacataatctgggccaatttcttaatttccatttatttcttgtctcattctattagtcttccttgataagaatgtttaagctactcatttttattataataacttgtattttatcatgctatattaatattattttctgattacttttaattctgcttttcaattttttttttaactttttcatacttgtatgcattaattatggttttaaaatatcccatttctggccaggctcagtggctcacgcctgtaatcctagcactttgtgaggccgaggcrggcggattacctgaggtcaggaggttcaagaccagcctggccaacatggcgaaaccctgtctctactaaaaatacaaaaaaattagccaggcatggtggcgcctgcctgtagtcccagctactcaggaggctgaggcaggagaatcgcttgaacccaggaggcagaggtcgccatgagccaagatcacaccattggcgacaagagcaagactccatctcaacaacaacaaaaaaatcccatttctaatgaataacttacaagttttactattatattcttattttactagtgatttctctttattttcatagttatttaaatatatatatttccatattggcagaatggaactccacagataatatgaaattctatccttcatcaaatgtttcactatcttgttctaaacctttccttatgcttcttcaattaaacagttttggcaatgtttttatcttacttacccttctttgtccttactcccatccccaactcttacatgttaattatttagaatttaattccaggatgttattaaatgctcctcctgtaacatatttgctgactattcccatttttttccaaattaatactgccctcatacattattactcatctagaactaactatttacaagaatcattgctcaccactatttttatgacctgtcttctgttattttgaggtctttgtacagttttaatttttatttcagtgcagaaatatccttgagtaatttcttcagaaaggatattgagatgttatactttttagctyaatgttttctgtctttgcctttacatttacatgatatattggacgagcataagatccttgagtcagtctttttctttaggaactttgttgttgcttcactatatagttgttgtttcaacaattttgtgttgtttcacagtttcactgtgacagtttgatgttaggttgattctttttcctcctctgtataaaagattatgtcaccagaatcttctttcattactttggataggacctaaaggaccctctcaatctgaaaatctatgctatttgttatcacagagcagttttctgctgtcatttctttgattgttacttttctatttattcctttttctctttctaaartgccattatttgtatattggagtcatagatctgagatctgtgaatttgctattcatgtctcatatctttttgcaaatggtttccatgtctccaagtctttgttctctattgtgagatattatttgtattgttttgtccagaatattaatttagttctattcattgactattctttggttttgctgttgaatttttaaattcaggaatagtgtgtttttctttcagattatttttttctgtgacctaattgcatcttcttacggggtcttattatattttgttgttgttatcgtgcttgtctgtctcttctattagttctgcttcaataggagccacctattcttgctttttcagctgaatccttttaaatgggttgtaatttttctttgcctactcttacccacacagatcaggctatcgttgactcttgagagtgttaaactaacaggtggtggaaggtaaagttggagattttggtgagatgtcttggcagccaaatgaactggaaagcgggcatgtctttgctgaggcatggatggcagggctgttttcagacctcctgaggggagraaaggctgtacttttataaaccctgtagttcacatcaaaggctgccagcatcattttaatggggaaacattttaagggacagtaaattacaagtgggaagagaaagtatgtctcagcatgttgagagggatctatttactaagcaggtagggccccctcagacagatgagaaatctttagtcttgcaacaaactactagaaatacaaaccttcacttggacgtggatcacttgggaactatgagatgcaaataatgataccagaacctacttttttattctctgaagaactcaagtgttcatatttaccagtggtgtccttgattctccagtagcagaccactcttctagctgagctgccgcaacaagttactagaaggaagaagagctcgtgaccatgcttccaggccattgtgaatcccagtttctgaattttatgccaaaataaggctgaagaattttctttgttataagttgagtaattgaagagaaaggatcatcaaaatgagttgggatattggtgtaaaaaagatcatgcatgtgtaaaaatggtattgtgaaaatttacttacagagtataaaatgttgcacttgcccattacagaaagaatttttttccaatagaaaagttttgagagacatttgtaaagtaacttaaaaattataagcccttgtgctttcatatttctcacttaaaagaagtttaacatgtttaacatcttacctcctgattctgactcgaccttggcagatataatggcttgcgtatagaagttctaaagtcaattttctaccagaaatatgaagtcagatcagtcccctgtgtgtgttcagaaagtggrgatgcccgcggttggcttggcaactaggcaggtgcaaacttcctgccacagggcagttctcgcgaaacatcacgaggtaaaatgatgctgttttaatcctcaaagacctcccgtttgcatttkattttatttacagatagccttggataccagttactggactttcattaatcacgtcttcatctgggggagcattgccatttatttctccattttatttacaatgcacagtaatggcatctttggcatcttcccaaaccwgtttccatttgttggtaagtgagtcatgttgactagtggaacctagtgtctgctgctgtttacttgtcttataatttattttttgtgttaggtagagctggggatgattagtgatcctttgtccagaaattgtttgagccaggcatctgaaggcttccgagtttaaaagtggctctaaaagctcagtttctgctgtctctactggatgcagaagaatcactcacagtagcttacaggttctcaacagcttacatgtagtaggctgtctctttgcaaatgagaggcatagcacatacattagggctacctgaagacctgtcaaatgctcatatatggtagagagaagaaaaagaaatactagactctccttttawgccacattatcaccaacatctgccaaaattcacccatagaacttatttgcatttagataagaatgaaacaatgtataatttagagccttctaaaaattcctggacattaatccataagtggcatgaggagtaggctttgtagttagtcagtcagggttcaagcgccagctgtgccacttaacaagctgtgtgactttgggcaagtttcttctttccatgcgagaatatataggaataaacaaaactcagtttctcctatactctcattcagcaagcaacacagaagacttctgtgacctctggtcatcgagaagtagggatttcttcccaccaacaaccaatgaggtgtttctgcagaggaccccagctggatgttctccaattcaattccggcaatatctccttggagggagtgtcagatcctacaagttgagggctaagttccgcatgactgcccccacacttccaatgctagtagcaagccacaggatgttttacctctacttttggccagctggctataaattggggtttccccccaaccccctccctgggtttgattaatttctagagtggctcaaagaactcagggagacccatttactggtttactataaaggatattacaaaggatacagataaagagatgcatagagcaatgtgtggaggaaggggcgtggaacttccatgccctttccaggcatgctgccctccaggaacctctacatgttcagctatctaggaactctttgaaccctgttctttaaggctgttatggaggcattttttatataggcatgactgataaagtcattggccattggtgatcaayttaaccttcagtccctcttcccttccaggagattagaggctggggctgaaactcccaaccctctaatcctaccttagtctttctgatgascagcccccatcctgaagctacctagggacttccagccatcagtcaactcattaacaaataaaaagacacatatcactgaggatttcaaggagttttaaatctatgccagaaaacagagaagaagaccaaacatacagctcacaatattatactatgcattaatgtcttcacttataaactgaggatattaataagcctattttcatggaaaatttatgaggattaaatgaaataatacatataaagcacttagcatgtatcctggtacatagtactttttaaatgttaaccatggtgatggtgattattattattcatgcaaatgtggctcgattactggtgggaagattgcagaggaatttgaacatcagatgagtagcaaaggaccctctaaaatcccttaaaaaagattctattattctacaaagagtatacctctggtctatgtatagggtataccatcattgcactccacatttcaaaatgattcccagcaaaggccactgagctttataaaagagggatattaatatactttctcagaggttttgaaatctctagtgtgtgtgaaataagctgctaaccgagttcatctaaacaaactggaaaagagagatgcgcagtgaccaacattcttgaacttaatcaggcaagagtgagatttgtatccactaattgaggaagtaaattcttggactaatttatgtagaaagcaaaataagaccacaaggactaaaataggattataaggttagtaaggttacaaatccacattgatgcaaaggcacctgaaattgtaattcaatttaaattcacgcatacacttaaaaatgttcttcaccttttgccttttcctacatgtaaatggaaatctttaagttgcaccactcttacttaatatgtactggtaatacgttgtttaccaaaagattccaactatgtagagacatgttggtcatgagtaagaatgagcatattgggaaacaaagacaccaaaactatttttgttttatttttttaagatcgtttgccaaaatgaaaagttcagtgtattgactagaagatttccagtcctaagagagcactgtgatgcataatgagactagaatgcctcaactggagaaagtaatttgtgcagggaccactcttttccagctaagcacaagccatttcagtaattaattactgagctccagtgaaattttttaaaagttagatcaacattggggtttcaggaaaattttttttttccttagtagctagcagcaaacaggagtgtggtttcaaagtgaagcttgttttcccagccatgcctgagggtactaagcttcaaggagctcaaagagacatttaattgattaagtcaagtttgtttctgcccatggctgaaggcaactggaatcagctgctcttgggtaggcagattcctgtctctaaagccagaaaaagcagacataccattcagtagccaagccctcatacccaaagcgcatttgaatggtggtaagctttgaatactgggataggggacctggataactgggggtatgatgataaatctctagaaaatgaacagggacaaaagtttattttggtgatataagcagggttggcatcttcccatggagcttgtctgcctgccttactgacccgtattgccttgtttaaacccacaatggggtatgtgaggtgtgagtaaaaagtaaggaaactggcttcaggcttggaaatgagtttcactgtcctattgccctagcatgttggatggctgcatcaacagtctcctggtgagggaatgttcttttcacaaacccaggagccttcttgatcttggaactttgaggacttcataaccaagtgaacaatagagaaataacaagttcctctgaggcaggttttctcgggccattgcctgaaattaaaaagttggtcctgcaatagataaagctccccttttatgacaagccaatcaatgcgatcattacttgagattgtacctgcatctggaacattttttgtgtagctttgatgtgatagttttaattcaagagtccacaagggtaaagggtaaatgtgccttttaaaaataatggctgctttgtaaccacaagatcttgatgctggaagagagaattgtgctccgtgagtgatattagactgagcctgggtgagagaatgcttggctcaggctggtaatctctaagtgatcaggccactaagccgttcctgagggtgatcttagcacttctgccttcttatcatcatggtgacattaggtgatccaaatctcaccattgaaaaaagatcttggccaggcgtggtggctcacgcctgtaatcctagcactttgggaggccgaggcaggaggatcatgaggtcagatcgagaccatcctggctaacatggtgaaaccctgcctctaccaaaaatacaaaaaaaattagccgggcgtggtggcgggcacctgtagtcccagctactcaggaggctgaggcaggagaatggcatgaacgcaggaggcagagcttgcagtgagctgagatcgcaccactgcattccaccagcctggaagacagagcaagactccatctcaaaaaaaaaaaagatcttgtaggaacaaagaacctattaattaataattcagtcctacttgtaaccacagtgtatattttctttaatgattgataggtaatgcacgacattccctgacccagaagtgcatctggcttgtaattctcttaacaacagtggcttcagttatgccagtggtggcattcagatttttgaaggtggatttatacccaaccctgagtgatcaggtatgtcacagtgctgatgaatacttgaaggctggtttttggctcttgaaatggtgtccttttctgccttattggaagctcagagatgggctaatgaaattgtcacaagcaaacacctactggtgcatgagatcacatcagaatagatgggacttcccacatcttgaatgtactagtccttagtgccatgaagagaggcatctatactaaatgtggatggggagtcataaattacaagttgaactgggtattttaaaaagctgacttttaaaaagaagatcacaggcatcattttggacaatttttccaagggaaaggcaagctataggaaaagatactgatttgagggcaagtacaagcacaataaaagagagacaagcatggtatgagtcaaaggggcttaacatttttgtagaaatccagtagcagattcagaaacatgggtgagatgttaccttctgaacagattaagaaggggaagagcagcatgctgggtagattagtacacttggaaggaaaataggaagaacaggttatagaaattccttaactggagaattaacagaacatatttcagaatttcatgggaagaggagtaagtaggacaatatcaacttaggtcaggactcagataaagcgtgaaaaggagaaagggagacaaacattcatagccatgtcatgagaagggggaacatgctgctgtggtgagtgggaccaggccagtgatgctgagagagactgaggtaggtaggtaggtaggtaggtaggtaggtaggtagatagatagatagatagacagacagacagacagacagacagacagacacacacacacacacacacacacacatttttttttaatcatgatgtctctgacattttgggaccaaagtgtaaaaagattccttccggaaaaattcggagtcccttgtcatatctgtcctctctctttggttctccaagctcattctgacataaacccagaaaatggcggatgagttaaggaaggaaggatgtgcttgtttgtccgataagtttgatcgtgatgttctgcttgatggttttctcctgacacaaaagtcaggatccaagtgatttgccaaaccagagaacaaggttgcttacaacaaacctcaggtctttttctccttagctttacagggaaatgaaagagtacagcaaacctcaggtctttttctccttagctttacaggggaatgaaagagttgtgggaaacctactcacataatagggaacatttagaaaggccatacaaacctaagaaatcaaaaccctggaagtctcatgatacgttgagctaccacaagaattgaatatttctgactcattttctgaattttcttctagtccagttactgacaactgttggatccagagaatctctaaaagagaggaaaaaggctgttttgggagaatgaaattataaattattatgctgactttgggcggtgcatgttagaaaatctttctatacaaatgtrtgctcatatgcattgaagatacmtgagagacaataatgaaatttgtctgatatttcttaattacttaatagtgtctcgatagagataaaaatggaccagtgcccccscagtgttatcttttgggtggaaaatttcttagtttttagatttaaaacttccttttgcaatgttgtttttacttataaaaaaaaaaggctttcactttacaaagtgggccactgcctggagtctatcatttggatgcatcatctcactttgggtctgtttctctccagatccgccggtggcagaaggctcaaaagaaggcaaggcctccaagtagccgaaggcctcggacccgcaggtcaagctcaagaaggtctggatatgcttttgctcaccaagaaggctatggagagcttatcacatctggaaaaaatatgcgagctaaaaatccacccccaacatcagggctggaaaagacacattataawagcactagctggattgaaaatttatgtaagaaaaccacagacaccgtgagcagctttagccaggataaaacagtgaaactgtgagtcaatatgaatttaaaccacgtagttatcttttcacttcaggtggagctgaaattctgctggctccagagtttgagatttgaggcaagaggtggggcaggcagattgcctcacttwacttaaatctgcggcagacaactgccagtgcccatcaaacaggagtgtgcgctatggaaaaccaggccagagggtcactgtctagtttgtgatttggtggacaaaacwctcgctgttacaagtacagattttttttttttaaatcaacctagataccaattgacctgaactttaraatcttatttatggagaaaaacttgtaaagctgcatattcactgaatggatcctcaggcggataaaagggtgcattttaaaggtatatatccaagctgaaaagcatgcctattgacagataaacatgtatctgtaagatcagcctttcccaaggtatacttttaaaatttaaagcgtgtactgtgttgctttcagactgagttgcatgtcactctttagtcttgatatctacctgtctgttcagccaggacaacaaatggcttccaagcctgaagaatacaaaagtgtgcttgtgtttctcatttttataccagtctagggacaaaggagactgaacatctttgcagcaggataggctggtaatttgatcaaatttattcaaaaagctctcagtctgtgtcatgtaaggacatgcttatgaaatgtgagagaggctcgccactaagtattctaaatacttttcaatggcttttctaacaacctcagtagtaatttgctgagcatcatccagaccattaatagaatcagcaaagcactggaatttcacactttaatgataatattccayatagtctatgggcaaatattttcaacatttccaatttttaaagcttcagaattgaagccaaacaaattaataaataattgttttaattactatttwaaaactcaggtttagattgtttaaaattagttgcttttgatactcagctgtcatgtttataattcaaacatgtagtaaacatatgtaggtaaggttgtttttttggagatgttgcagctcaaatttcagtccacatatgaatcatcagtgtattttccataaagtgattygggcatatttgtgtgaaaacctcagttctgtcacttcttacctctataaacttggacgataatgtgccttctctgagactcagtttcttcctctgtaaaatgaggacatactacctacctcatgtggttggttgatgattgtctgtcaaagcacaaactctgaaattattaaaaacataattatttcataaacagatgagttaagttccagttaactcaacatcagtataacagagcaattggaagagaatatgaaaaaactggaatctaaatagtcagtgaggaaggctttgataaaatgaaattgccagaaagatataaaactggttagggtcctacagggaaataaaattataaccgtggaggtacatttctctaccagaaagcaaaaataaagcatcatgtcttaatggttttctacaaatcaacttctaattctacagagtccttaatctggtccctattaaattcttggtcagacaaagttacatttcccaagagagtcaggtgacacttgagtgagtttgatggataatgagctaatgtgatatctataggtcacaattttttaaaaccaaaattttcaagtctgggataatctttcctaaatgggatcaaatgaaataatatgtgtaaaagagtcaaatgcagtcctttaccatagtaactgcctatggacgttgtctttcccttacatgcctgcctacacttaaccagatgttggttttcaatgtctaatttgtcattagtttcaccacatttgctcactttttgtaacatttttgcaagatttgaaaactttcagtaaatgttttggcactattggtacttgatgttttatctcttctttatgggaaattcaytggggagatttttgttacattagtccacgggtatttttttctctcctttacatgctggggaaaatgtactcattcttagaatcagagtcaagaataaaatgaaacaattggacctatgtgtaagggataggaaagattagaagtggtccaattttgcaagtccagtttaaattaaataaggctgtttataaacaaatagtgtggatgattgtgagagaaacatattatcagcttactttggccccatgagatccaagtaaactcacacacccattgcgagatcattcaattacaagcgccagggattattttgaacctgaagatgaaaagtgatgagaggtgggtagtgatggtgggggcactggggaataataacattttaattttacataaatgttatcaaattatttggaaagaaaaactattttttctagatttaagctgataatcttgtgtttttaaaatctcagcccaagttttgagctattataggtaattgcaaattgtgtttccctgacttagctctgctatctttggctctctcctctgcctccagatgtatatacttatgaaggaaagaaagagagagaggaaggaagaaagtaagacagataaagcaagagaggaaaaagtaatggaggaaaggatggtgggagggagaaaagagttttccagttatatgtttttttgagataatctgactctctgaaaaataaatgtaatccctcaaagaaaaaaaaagtggattatatttgactcttgaatagtaaaatttccttcacatcttgtgtgagaacaagaaaatcttaccagaatgggggccgggagccctggcttcytgtcacagtgatggtgctgatctgtgtgagctggggcatgccacctgacttctccaggccttggtgtccttgtccattgatagagaaattgggacaggatggtcttaaagcccttttctcatttacccaatctgtgagctgttcttgtcagtgttgtctgttgtgtatttgcaattgcctttgttagagagacagattttctatatatatatatatagagagagagagagagagagagagagaagaaactgacttggatgttctcttgagggcagggcctggctcttcaggctgttgtactggtttgtatttctctagactagcccctgatgcactgctgtctctggcttttctctcagctcaccacagagctgctaaaccctgtggtggcattttacctgggtcagttgaatgctgtttcttgttaatgattcatgaaggtatctccacaccctcctttcctctctcatcattttgagtaacaaaagtatccagatgtgaaggtaagatactcatgtcctgttaagaagagctcatttaaaagtcctccctaccttgaatctgggcttagaggagattctttgagcctttgttcccttgggaccgaagttgaagcaacagagcttgaacaattttcttcatagttatagagcactttgcagtttgtgtatcattcttacataaactgtattgtgtctgtgtagatgtaaagtgtgcagatttagggaaaagtgtaaataaatgtaaaaatgttcagaaatatatgtttcaaatgttcttttacctttcagtgcaaataagaaaaatctcccttccttccttcctttcctacagcatttagtgacgtcaggtaggtgtggaaggcaaaggaaataaaaatgtctcaaactatttctaaaaagtcactaggaaatccaactaatgagaaaagctctacttctgatttttatggtaagaaattgaattactctgttagtgtgtgcacaaaatgcctcaagattgatataatctaattatctcagttatatgactcagaattattattttacactacaaagagtaggcacaaagttaatagtgtaggaatccaggaataatgatgacttacagactttgtgatggaattctgcaggccatgggtcagataaccgtgtgggggggggggtcacaattttccaatttttacattaacatctggtattaaatgtctgcagtttgctctactgcgtcacatttcattccttggtgagaaatcataagcttttgcaattctctagcctaagcctttagctgaactgcctggaagccagaactaaatgacccacgtattaccaaatgtgtattgcaaaagatttggaggaccttgctgggctaatctgtagtttggggctatgacttaaccctatctgtccttgaatttcaaaacttcctggcagatctattcctgtaactggtgcagaatacaaatcagcttggagctgcatacataaacatccagatttcaagaaataataatgattagttggccagatatctctggctatctcaattcagattcccataaggtttataagggcaagttaaaatttttaataaactgcagccctagacttacacagaaaattcttactggagcaggatgcatggagagatgatagttaacttggaagtaaagtaatgatcaagaagaaatctagttgtttcaccccttgtaataaatgtttctatactccctgccttcttctaggtaaatgtgagcaatgattaggatgcttctttaacagctgatgattttccttctcatcccctttctgtctctgctccagtatgtgacactatagagatacagggaagtatgagataatgcaccaagattggacagaaataataatattgaccccaaaacatcctcagaaaaggttttgaataaaattcctgttactgaatttcttgagataatgtcactttcattaaatgactactgaaaaagaataaattaatttgggattatgattagtgactgggggagatattaagcttatttaacaaacagttggacagggacactgaccaataagaatgaacatgggccatcaatggctagtcttgccccactgctaatggcagctggcactctgacctatttggaccacgtgataagtcacatttgaaactatacctatttttctttatgaggtgcctatttggtctaaaccagataaaaacagcaagatttttttttaaaccaagtaacaccaaaaacactatagggcaggtcaaaatattttcctggtatcgttttgtgtggtagctaatagttttctgaaggtacgagatgatgtgttttgaacaacaggaatagtttctaactgcatattattgacaaaatatgtttaggtattgtgtatggttttttgtctcaatgaatactaacatttttaattgaaatatttttaaaaatatatattttacaattataatataaataattgtggttcatagtttgggagcttagttaaatacttaggggtagacaagatgaccagaattatctttttgattgacaggcaagactttgttttacggttccatttcttcctcaaagttctcatgtatggttcacacatagcttacatctagtagacctctcagatgaaatgtactaacaaatttagttctactggactaaatttaaaattaataagtgaatcaatcacttaatagaacactgagtgtggagaggccacggtacaagataaataagaaatggtttctttttcttgccttcggagaggttctaacccagtatctttcaaccatgcattatacataccacagttgatggaatctaaaatgcccccttgtaaatgatgcaccattcatttacataccacgggaaaacaagaagaatattgccgcttagagttgtaaagatgccattggatgtaagatttacttctaatttcagagatgttaaattatgaaatctggtaagtattggattgcaggaggtttaaaaatatagttcatgtcaactacttttttattgtattgctgtacaggaagcatgtcagcatctgcttctggggaggcctcaggaagcttccaatcatggcagaggtgaagggggagcaggcacatcacatgatgaaagcaggagtaaggaaaagggagtggggaagatgccacacactttgaacaaccagatctcctgtgaatttatcaccaaggggatggcccaagccattcatgagagatccacctccatgatccaaacatcttccaccaggccccacctccaacattggggatcacatttcaacatgagattttggcagggacaaatatccaaactgtatcaggactaaggaccaagcccttctctgtctcttgggactaggtaagacctgaaattcttatacgctccaaggagatggaatggacagactagaggttcagagccagtctaatttgatatgaaaaggtaaaaaaatttgatacttcttacatctcagttctgtagaagaaactcaaacccattgtgtaattctttcacttgatatttggtataatagtcatggtcatcagctcattctgagcaggagtgctaatgaaggatgtgtgtctgtcaagtccaggctgcttcatacaactcttgtgcactccaccctctatccccccatcatcctcacccccagttcttcctcctattccccacactgtggtggtgttgttaattcatccacccattaggctgaaatgcaggatatcaggcccaggcccctaattgctgttgtagactggatacacattcttatcaactccctttaccatgggcttttttctctgaccctctggtaagtggcctgggaccttctctaaaatagcatcataaatcagccagagctggagtggtatcaccacaaaatgaagaaggagatgagtagagtaccttctacacatcctcaccctgggtggctcaaagaggaactatgcttgtctgagtaccattgatgattgagatagaattgtaaggtgggtgatctgtcttgcgtagcctccttcactctaatctaatcttaccacctaacatgcccttccccatctaggttactcttctaagtctgcctcagttacctgctgtaacccctttaaaagtgttccaggtgattctcctgcattcgcccaggagactatgtacatactttcaacttgatgcaggaacttccttcagaataagcctgcagatggcattcagtctctgctcagatgttcccaatgatgcagtgctcatgagctcaacgaagccagctcccttcgaacagctccattggtgaggaatctccttcttcttttgacctgaggtctgtttccccatcattaccctgcatt
